(19) United States
(12) Patent Application Publication
(10) Pub. No.: US 2004/0115625 A1
(43) Pub. Date: Jun. 17, 2004

(54) Cancer gene determination and therapeutic screening using signature gene sets

(76) Inventor: Reinhard Ebner, Gaithersburg, MD (US)

Correspondence Address: CARELLA, BYRNE, BAIN, GILFILLAN, CECCHI, STEWART &, OLSTEIN, 6 Becker Farm Road, Roseland, NJ, 07068, US

(21) Appl. No.: 09/968,007

(22) Filed: Oct. 2, 2001

Related U.S. Application Data
(60) Provisional application No. 60/237,172, filed on Oct. 2, 2000.
(60) Provisional application No. 60/237,173, filed on Oct. 2, 2000.
(60) Provisional application No. 60/237,278, filed on Oct. 2, 2000.
(60) Provisional application No. 60/237,294, filed on Oct. 2, 2000.
(60) Provisional application No. 60/237,295, filed on Oct. 2, 2000.
(60) Provisional application No. 60/237,316, filed on Oct. 2, 2000.

(51) Int. Cl. C12Q 1/68; C07H 21/04

(52) U.S. Cl. 435/6; 536/23.2

(57) ABSTRACT

Processes for assaying potential antitumor agents based on their modulation of the expression of specified genes, or sets, of suspected cancer cell genes, especially for kidney cancer, are disclosed, along with methods for diagnosing cancerous, or potentially cancerous, conditions as a result of the expression, or patterns of expression, of such genes, or sets of genes. Also disclosed are methods for determining functionally related genes, or gene sets, as well as methods for treating cancer based on targeting expression products of such genes, or gene sets, and determining genes involved in the cancerous process.

[0001] This application claims priority of U.S. Provisional Applications 60/237,172, filed Oct. 2, 2000, 60/237,173, filed Oct. 2, 2000; 60/237,278, filed Oct. 2, 2000; 60/237,294, filed Oct. 2, 2000; 60/237,295, filed Oct. 2, 2000 and 60/237,316, filed Oct. 2, 2000, the disclosures of which are hereby incorporated by reference in their entirety.

### FIELD OF THE INVENTION

[0002] The present invention relates to methods of assaying potential anti-tumor agents based on their modulation of the expression of specified sets of genes and methods for diagnosing cancerous, or potentially cancerous, conditions as a result of the patterns of expression of such genes.

### BACKGROUND OF THE INVENTION

[0003] Screening assays for novel drugs are based on the response of model cell based systems in vitro to treatment with specific compounds. Various measures of cellular response have been utilized, including the release of cytokines, alterations in cell surface markers, activation of specific enzymes, as well as alterations in ion flux and/or pH. Some such screens rely on specific genes, such as oncogenes (or gene mutations).

### BRIEF SUMMARY OF THE INVENTION

[0004] In accordance with the present invention, there are provided characteristic sets of gene sequences whose expression, or non-expression, or change in expression, either an increase or decrease thereof, are indicative of the cancerous or non-cancerous status of a given cell, especially kidney. More particularly, such genes whose expression is changed in cancerous, as compared to non-cancerous cells, from a specific tissue (in particular, kidney) are genes that include one of the nucleotide sequences of SEQ ID NO: 1-1001, or sequences that are substantially identical to, or incorporated in, these sequences. Such a change in expression may be an increase or a decrease in expression or activity of the gene or gene sequences disclosed herein.

[0005] It is another object of the present invention to provide methods of using such characteristic, or signature, gene sets as a basis for assaying the potential ability of selected chemical agents to modulate upward or downward the expression of said characteristic, or signature, gene sets.

[0006] It is a further object of the present invention to provide methods of detecting the expression, or non-expression, or amount of expression, of said characteristic, or signature, gene sets, or portions thereof, as a means of determining the cancerous, or non-cancerous, status (or potential cancerous status) of selected cells as grown in culture or as maintained in situ.

[0007] It is a still further object of the present invention to provide methods for treating cancerous conditions utilizing selected chemical agents as determined from their ability to modulate (i.e., increase or decrease) the selected characteristic, or signature, gene sets as disclosed herein, where said genes include, or comprise, one of the sequences of SEQ ID NO: 1-1001, or sequences substantially identical to said sequences, or characteristic portions of said sequences.

[0008] In one aspect, the present invention relates to a process for identifying an agent that modulates the activity of a cancer-related gene comprising:

[0009] (a) contacting a compound with a cell containing a gene corresponding to (such as a gene that encodes an RNA at least 90% identical to the RNA encoded by or complementary to) a polynucleotide comprising, or having, a sequence selected from the group consisting of SEQ ID NO: 1-1001 and under conditions promoting the expression of said gene; and

[0010] (b) detecting a difference in expression of said gene relative to when said compound is not present

[0011] thereby identifying an agent that modulates the activity of a cancer-related gene. Such a process is especially useful for agents effective against cancer of the kidney, including Wilm's tumor and carcinomas, such as clear cell carcinoma and renal cell carcinoma.

[0012] The present invention also relates to a process for identifying an anti-neoplastic agent comprising contacting a cell exhibiting neoplastic activity with a compound first identified as a cancer-related gene modulator using an assay process as disclosed herein for determining gene modulating activity and detecting a decrease in said neoplastic activity after said contacting compared to when said contacting does not occur.

[0013] In a further aspect, the present invention relates to a process for identifying an anti-neoplastic or anti-tumor agent comprising administering to an animal exhibiting a cancerous condition an effective amount of an agent first identified according to a process as disclosed herein and detecting a decrease in said cancerous condition thereby identifying such an agent, said decrease including the death of the cancerous cell or cells.

[0014] The present invention also relates to a process for determining the cancerous status of a cell, comprising determining the level of expression in said cell of at least one gene that corresponds to a polynucleotide comprising, or having, a sequence selected from the group consisting of SEQ ID NO: 1-1001 wherein an elevated expression relative to a known non-cancerous cell when the sequence is one of SEQ ID NO: 146-215, 504-686 and 760-1001 or a reduced expression relative to a known non-cancerous cell when the sequence is one of SEQ ID NO: 1-145, 216-503 and 687-759, indicates a cancerous state or potentially cancerous state. Such sequence identity may include 100 percent identical as defined herein and any number of such genes may be used.

[0015] In an additional aspect, the present invention relates to a process for determining a cancer initiating or facilitating gene comprising contacting a cell expressing a test gene (i.e., a gene whose status as a cancer initiating or facilitating gene is to be determined) with an agent that decreases the expression of a gene that encodes an RNA at least 90%, preferably 95%, identical to an RNA encoded by (i.e., a gene corresponding to) a polynucleotide comprising, or having, a sequence selected from the group consisting of SEQ ID NO: 146-215, 504-686 and 760-1001 and detecting a decrease in expression of said test gene compared to when said agent is not present, thereby identifying said test gene as being a cancer initiating or facilitating gene. Such genes may, of course, be oncogenes and said decrease in expression may be due to a decrease in copy number of said gene in said cell or a cell derived from said cell, such as where copy number is reduced in the cells formed by replication of such cells.

[0016] The present invention also relates to a process for determining a cancer suppressor gene comprising contacting a cell expressing a test gene (i.e., a gene whose status as a cancer suppressor gene is to be determined) with an agent that increases the expression of a gene that corresponds to (i.e., encodes an RNA at least 90%, preferably 95%, identical to an RNA encoded by or complementary to) a polynucleotide comprising a sequence selected from the group consisting of SEQ ID NO: 1-145, 216-503 and 687-759 and detecting an increase in expression of said test gene compared to when said agent is not present, thereby identifying said test gene as being a cancer suppressor gene. The sequence identity may include identical sequences, as defined herein, and such a process includes embodiments wherein the increase in expression is due to an increase in copy number of the gene in said cell or a cell derived from said cell, such as following cellular replication.

[0017] In another aspect, the present invention relates to a process for treating cancer comprising contacting a cancerous cell with an agent having activity against an expression product encoded by a gene corresponding to a polynucleotide comprising a nucleotide sequence selected from at least one of SEQ ID NO: 146-215, 504-686 and 760-1001. Such a process includes an embodiment wherein the cancerous cell is contacted in vivo. The agent may include an antibody. In a preferred embodiment, the cancer is cancer of the kidney, especially a carcinoma, most preferably clear cell carcinoma or renal cell carcinoma. In another preferred embodiment, the cancer is Wilm's tumor.

[0018] The present invention also relates to a method for producing a product comprising identifying an agent according to the assay processes of the invention wherein said product is the data collected with respect to said agent as a result of said process and wherein said data is sufficient to convey the chemical structure and/or properties of said agent.

[0019] The present invention further relates to a process for treating a cancerous condition in an animal afflicted therewith comprising administering to said animal a therapeutically effective amount of an agent first identified as having anti-neoplastic activity using one or more of the processes of the invention.

[0020] In a further aspect, the present invention relates to a process for protecting an animal against cancer comprising administering to an animal at risk of developing cancer a therapeutically effective amount of an agent first identified as having anti-neoplastic activity using one or more of the processes disclosed herein.

### DETAILED SUMMARY OF THE INVENTION

[0021] The present invention relates to methods of assaying for potential antitumor agents based on their modulation of the expression of specified sets of genes and methods for diagnosing cancerous, or potentially cancerous, conditions, especially of kidney, as a result of the patterns of expression of such gene sets and for determining cancer-inducing or regulating genes, and gene sets, based on common expression or regulation of such genes, or gene sets.

[0022] In accordance with the present invention, model cellular systems using cell lines, primary cells, or tissue samples are maintained in growth medium and may be treated with compounds that may be at a single concentration or at a range of concentrations. At specific times after treatment, cellular RNAs are isolated from the treated cells, primary cells or tumors, which RNAs are indicative of expression of selected genes. The cellular RNA is then divided and subjected to analysis that detects the presence and/or quantity of specific RNA transcripts, which transcripts may then be amplified for detection purposes using standard methodologies, such as, for example, reverse transcriptase polymerase chain reaction (RT-PCR), etc. The presence or absence, or levels, of specific RNA transcripts are determined from these measurements and a metric derived for the type and degree of response of the sample to the treated compound compared to control samples.

[0023] Also in accordance with the present invention, there are disclosed herein characteristic, or signature, sets of genes and gene sequences whose expression is, or can be, as a result of the methods of the present invention, linked to, or used to characterize, the cancerous, or non-cancerous, status of the cells, or tissues, to be tested, especially tissues derived from kidney (i.e., cancer-related genes and gene sequences). Thus, the methods of the present invention identify novel anti-neoplastic agents based on their alteration of expression of small sets of characteristic, or indicator, or signature genes in specific model systems. The methods of the invention may therefore be used with a variety of cell lines or with primary samples from tumors maintained in vitro under suitable culture conditions for varying periods of time, or in situ in suitable animal models.

[0024] More particularly, certain genes have been identified that are expressed at levels in cancer cells that are different than the expression levels in non-cancer cells. In one instance, the identified genes are expressed at higher levels in cancer cells than in normal cells. In another instance, the identified genes are expressed at lower levels in cancer cells as compared to normal cells.

[0025] In accordance with the foregoing, the present invention relates to a process for determining the cancerous status of a cell, comprising determining the level of expression in said cell of at least one gene that corresponds to (i.e., encodes an RNA at least 95% identical to the RNA encoded by or complementary to) a polynucleotide comprising a sequence selected from the group consisting of SEQ ID NO: 1-1001 wherein an elevated expression relative to a known non-cancerous cell when the sequence is one of SEQ ID NO: 146-215, 504-686 and 760-1001, or a reduced expression relative to a known non-cancerous cell when the sequence is one of SEQ ID NO: 1-145, 216-503 and 687-759, indicates a cancerous state or potentially cancerous state. Such sequence identity may include 100 percent identical as defined herein and any number of such genes may be used.

[0026] Thus, the present invention also relates to a process for identifying an anti-neoplastic agent comprising contacting a cell exhibiting neoplastic activity with a compound first identified as a cancer-related gene modulator using an assay process as disclosed herein for determining gene modulating activity and detecting a decrease in said neoplastic activity after said contacting compared to when said contacting does not occur (i.e., comparing expression when said agent is present versus when said agent is not present).

[0027] In preferred embodiments of the present invention, such cancer is kidney cancer, such as a carcinoma, preferably clear cell carcinoma or renal cell carcinoma. In another preferred embodiment, the cancer is Wilm's tumor.

[0028] In a further aspect, the present invention relates to a process for identifying an anti-neoplastic agent comprising administering to an animal exhibiting a cancerous condition an effective amount of an agent first identified as having such activity using a process as disclosed herein and detecting a decrease in said cancerous condition thereby identifying such an agent.

[0029] It should be kept in mind that the anti-tumor or anti-neoplastic agents identified by the processes of the invention include both novel agents whose structure and anti-tumor activity were not previously known prior to identification of their activity by the processes herein as well as non-novel agents, whose structure was known but whose therapeutic value as anti-tumor agents was not appreciated prior to identification by the assay processes of the invention.

[0030] In accordance with the foregoing, the present invention relates to a process for screening for an anti-neoplastic agent comprising the steps of:

[0031] (a) contacting a compound with a cell containing a polynucleotide comprising a nucleotide sequence selected from the group consisting of SEQ ID NO: 1-1001, or a sequence at least 95% identical thereto, under conditions wherein said polynucleotide is being expressed, and

[0032] (b) determining a change in expression of at least one of said polynucleotides,

[0033] wherein a change in expression is indicative of anti-neoplastic activity.

[0034] In particular embodiments, such change in expression may be an increase or a decrease in expression or activity. Of course, decreased expression of cancer initiating or facilitating genes is highly desirable, as is an increased expression of cancer suppressor genes.

[0035] More particularly, the present invention relates to a process for screening for an anti-neoplastic agent comprising the steps of:

[0036] (a) exposing a known cancerous cell to a chemical agent to be tested for antineoplastic activity;

[0037] (b) allowing said chemical agent to modulate the activity of one or more genes present in said cell wherein said genes include or comprise one of the sequences selected from the group consisting of the sequences of SEQ ID NO: 1-1001, sequences substantially identical to said sequences, or the complements of any of the foregoing;

[0038] (c) determining the expression of one or more genes of step (b);

[0039] (d) comparing the expression of said genes in the presence or absence of exposure to said chemical agent;

[0040] wherein a difference in expression is indicative of the ability of anti-neoplastic activity.

[0041] Thus, in one aspect, the present invention relates to a process for identifying an agent that modulates the activity of a cancer-related gene, especially for cancer of the kidney, comprising:

[0042] (a) contacting a compound with a cell containing a gene that encodes an RNA at least 90 or 95% identical to the RNA encoded by (i.e., a gene that corresponds to) a polynucleotide comprising, or having, a sequence selected from the group consisting of SEQ ID NO: 1-1001 and under conditions promoting the expression of said gene; and

[0043] (b) detecting a difference in expression of said gene relative to when said compound is not present

[0044] thereby identifying an agent that modulates the activity of a cancer-related gene.

[0045] Such sequence identity includes embodiments wherein the RNAs are at least 97 or 98% identical in sequence as well as cases where the sequence is the same, thus where a gene encodes an RNA with the same nucleotide sequence as an RNA encoded by one of the sequences of SEQ ID NO: 1-1001.

[0046] In one embodiment of such processes, the sequence is selected from SEQ ID NO: 146-215, 504-686 and 760-1001, and said difference in expression is a decrease in expression. Here, the gene used encodes an RNA like that encoded by (or at least 90% identical to) one of the sequences found to be expressed at an elevated level in cancer cells, especially kidney cancer cells. In another such embodiment, the sequence is selected from SEQ ID NO: 1-145, 216-503 and 687-759 and said difference in expression is an increase in expression. The latter sequences encode RNAs found to be expressed at higher levels in normal cells, such as kidney cells, as opposed to cancer cells.

[0047] In specific embodiments of the present invention, said chemical agent to be tested modulates the expression of more than one said gene, especially where it modulates at least two said genes, more especially where at least 3, or at least 5 of said genes, or even 10 or more of said genes in said signature set, are modulated. In a preferred embodiment, this may include more than 10 (such as 20, 50 or even 100) or even all of said genes are modulated.

[0048] In one embodiment of the present invention, said gene modulation is downward modulation, so that, as a result of exposure to the chemical agent to be tested, one or more genes of the cancerous cell will be expressed at a lower level (or not expressed at all) when exposed to (i.e., contacted with) the agent as compared to the expression when not exposed to the agent (i.e., when said agent is not present).

[0049] In a preferred embodiment a selected set of said genes are expressed in the reference cell but not expressed in the cell to be tested as a result of the contacting or exposure of the test cell with the chemical agent. Thus, where said chemical agent causes the gene, or genes, of the tested cell to be expressed at a lower level than the same genes of the reference cell, this is indicative of downward modulation and indicates that the chemical agent to be tested has anti-neoplastic activity (or activity in reducing expression of such cancer-related genes).

[0050] In a separate embodiment, exposure of said cells to be tested to the chemical agent, especially one suspected of having anti-neoplastic activity, may result in upward modulation of said genes of the cell to be tested. Such upward modulation is interpreted as meaning that said genes are expressed where previously not expressed, or else are expressed in greater quantities, or at higher levels, when exposed to the agent as compared to non-exposure to the agent.

[0051] Such upward modulation may be taken as indicative of anti-neoplastic activity by the tested chemical agent(s) of the gene, or genes, so modulated, resulting in lower neoplastic activity on the part of such cells, such as where increased expression of the gene, or genes, results in decreased growth and/or increased differentiation of said cells away from the cancerous state.

[0052] The genes useful in the assay processes include, respectively, as a part thereof at least one of the sequences selected from the group consisting of the sequences of SEQ ID NO: 1-1001, or sequences substantially identical thereto. Such sequences also include sequences complementary to any of the sequences disclosed herein.

[0053] The genes identified by the present disclosure are considered “cancer-related” genes, as this term is used herein, and include genes expressed at higher levels (due, for example, to elevated rates of expression, elevated extent of expression or increased copy number) in cancer cells relative to expression of these genes in normal (i.e., non-cancerous) cells where said cancerous state or status of test cells or tissues has been determined by methods known in the art, such as by reverse transcriptase polymerase chain reaction (RT-PCR) as described in the Example below. In specific embodiments, this relates to the genes whose sequences correspond to the sequences of SEQ ID NO: 146-215, 504-686 and 760-1001. Also specifically contemplated are genes whose expression is higher in normal as opposed to known cancer cells (as determined by other means, such as uncontrolled growth, change in antigenic surface proteins, genetic mutation, and the like) such that the decreased expression in cancer cells may be indicative of, or contributory to, the realization of the cancerous state. In specific embodiments thereof, this relates to the genes whose sequences correspond to the sequences of SEQ ID NO: 1-145, 216-503 and 687-759 disclosed herein. As used herein, the term “correspond” means that the gene has the indicated nucleotide sequence or that it encodes substantially the same RNA as would be encoded by the indicated sequence, the term “substantially” meaning about at least 90% identical as defined elsewhere herein and includes splice variants thereof.

[0054] The sequences disclosed herein may be genomic in nature and thus represent the sequence of an actual gene, such as a human gene, or may be a cDNA sequence derived from a messenger RNA (mRNA) and thus represent contiguous exonic sequences derived from a corresponding genomic sequence or they may be wholly synthetic in origin for purposes of tecting. As described in the Example, the expression of these cancer-related genes is determined from the relative expression levels of the RNA complement of a cancerous cell relative to a normal (i.e., non-cancerous) cell. Because of the processing that may take place in transforming the initial RNA transcript into the final mRNA, the sequences disclosed herein may represent less than the full genomic sequence. They may also represent sequences derived from ribosomal and transfer RNAs. Consequently, the genes present in the cell (and representing the genomic sequences) and the sequences disclosed herein, which are mostly cDNA sequences, may be identical or may be such that the cDNAs contain less than the full genomic sequence. Such genes and cDNA sequences are still considered corresponding sequences because they both encode similar RNA sequences. Thus, by way of non-limiting example only, a gene that encodes an RNA transcript, which is then processed into a shorter mRNA, is deemed to encode both such RNAs and therefore encodes an RNA complementary to (using the usual Watson-Crick complementarity rules), or that would otherwise be encoded by, a cDNA (for example, a sequence as disclosed herein). Thus, the sequences disclosed herein correspond to genes contained in the cancerous or normal cells used to determine relative levels of expression because they represent the same sequences or are complementary to RNAs encoded by these genes. Such genes also include different alleles and splice variants that may occur in the cells used in the processes of the invention.

[0055] The genes of the invention “correspond to” a polynucleotide having a sequence of SEQ ID NO: 1-1001 if the gene encodes an RNA (processed or unprocessed, including naturally occurring splice variants and alleles) that is at least 90% identical, preferably at least 95% identical, most preferably at least 98% identical to, and especially identical to, an RNA that would be encoded by, or be complementary to, such as by hybridization with, a polynucleotide having the indicated sequence. In addition, genes including sequences at least 90% identical to a sequence selected from SEQ ID NO: 1-1001, preferably at least about 95% identical to such a sequence, more preferably at least about 98% identical to such sequence and most preferably comprising such sequence are specifically contemplated by all of the processes of the present invention as being genes that correspond to these sequences. In addition, sequences encoding the same proteins as any of these sequences, regardless of the percent identity of such sequences, are also specifically contemplated by any of the methods of the present invention that rely on any or all of said sequences, regardless of how they are otherwise described or limited. Thus, any such sequences are available for use in carrying out any of the methods disclosed according to the invention. Such sequences also include any open reading frames, as defined herein, present within any of the sequences of SEQ ID NO: 1-1001.

[0056] Further in accordance with the present invention, the term “percent identity” or “percent identical,” when referring to a sequence, means that a sequence is compared to a claimed or described sequence after alignment of the sequence to be compared (the “Compared Sequence”) with the described or claimed sequence (the “Reference Sequence”). The Percent Identity is then determined according to the following formula:

Percent Identity=100[1−(C/R)]

[0057] wherein C is the number of differences between the Reference Sequence and the Compared Sequence over the length of alignment between the Reference Sequence and the Compared Sequence wherein (i) each base or amino acid in the Reference Sequence that does not have a corresponding aligned base or amino acid in the Compared Sequence and (ii) each gap in the Reference Sequence and (iii) each aligned base or amino acid in the Reference Sequence that is different from an aligned base or amino acid in the Compared Sequence, constitutes a difference; and R is the number of bases or amino acids in the Reference Sequence over the length of the alignment with the Compared Sequence with any gap created in the Reference Sequence also being counted as a base or amino acid.

[0058] If an alignment exists between the Compared Sequence and the Reference Sequence for which the percent identity as calculated above is about equal to or greater than a specified minimum Percent Identity then the Compared Sequence has the specified minimum percent identity to the Reference Sequence even though alignments may exist in which the hereinabove calculated Percent Identity is less than the specified Percent Identity.

[0059] As used herein, the terms “portion,” “segment,” and “fragment,” when used in relation to polypeptides, refer to a continuous sequence of nucleotide residues, sequence forms a subset of a larger sequence. Such terms include the products produced by treatment of said polynucleotides with any of the common endonucleases, or any stretch of polynucleotides that could be synthetically synthesized. These may include exonic and intronic sequences of the corresponding genes.

[0060] As used herein and except as noted otherwise, all terms are defined as given below.

[0061] In accordance with the present invention, the term “DNA segment” or “DNA sequence” refers to a DNA polymer, in the form of a separate fragment or as a component of a larger DNA construct, which has been derived from DNA isolated at least once in substantially pure form, i.e., free of contaminating endogenous materials and in a quantity or concentration enabling identification, manipulation, and recovery of the segment and its component nucleotide sequences by standard biochemical methods, for example, using a cloning vector. Such segments are provided in the form of an open reading frame uninterrupted by internal nontranslated sequences, or introns, which are typically present in eukaryotic genes. Sequences of non-translated DNA may be present downstream from the open reading frame, where the same do not interfere with manipulation or expression of the coding regions.

[0062] The term “coding region” refers to that portion of a gene which either naturally or normally codes for the expression product of that gene in its natural genomic environment, i.e., the region coding in vivo for the native expression product of the gene. The coding region can be from a normal, mutated or altered gene, or can even be from a DNA sequence, or gene, wholly synthesized in the laboratory using methods well known to those of skill in the art of DNA synthesis.

[0063] In accordance with the present invention, the term “nucleotide sequence” refers to a heteropolymer of deoxyribonucleotides. Generally, DNA segments encoding the proteins provided by this invention are assembled from cDNA fragments and short oligonucleotide linkers, or from a series of oligonucleotides, to provide a synthetic gene which is capable of being expressed in a recombinant transcriptional unit comprising regulatory elements derived from a microbial or viral operon.

[0064] The term “expression product” means that polypeptide or protein that is the natural translation product of the gene and any nucleic acid sequences coding equivalents resulting from genetic code degeneracy and thus coding for the same amino acid(s).

[0065] The term “fragment,” when referring to a coding sequence, means a portion of DNA comprising less than the complete coding region whose expression product retains essentially the same biological function or activity as the expression product of the complete coding region.

[0066] The term “primer” means a short nucleic acid sequence that is paired with one strand of DNA and provides a free 3′-OH end at which a DNA polymerase starts synthesis of a deoxyribonucleotide chain. These include PCR primers.

[0067] The term “promoter” means a region of DNA involved in binding of RNA polymerase to initiate transcription. The term “enhancer” refers to a region of DNA that, when present and active, has the effect of increasing expression of a different DNA sequence that is being expressed, thereby increasing the amount of expression product formed from said different DNA sequence.

[0068] The term “open reading frame (ORF)” means a series of triplets coding for amino acids without any termination codons and is a sequence (potentially) translatable into protein.

[0069] As used herein, reference to a DNA sequence includes both single stranded and double stranded DNA. Thus, the specific sequence, unless the context indicates otherwise, refers to the single strand DNA of such sequence, the duplex of such sequence with its complement (double stranded DNA) and the complement of such sequence.

[0070] In carrying out the assays of the invention, relative antineoplastic activity may be ascertained by the extent to which a given chemical agent modulates the expression of genes present in a cancerous cell. Thus, a first chemical agent that modulates the expression of a gene associated with the cancerous state (i.e., a gene that includes one of the sequences disclosed herein and present in cancerous cells) to a larger degree than a second chemical agent tested by the assays of the invention is thereby deemed to have higher, or more desirable, or more advantageous, anti-neoplastic activity than said second chemical agent. Alternatively, where first and second chemical agents modulate expression of more than one of said genes, but where the second modulates expression of, for example, five said genes, whereas the first modulates expression of only three of said genes, especially where the three form a subset of the five, then the second chemical agent is deemed a more potent anti-neoplastic agent than the first. Such anti-neoplastic activity, as determined using the assays of the present invention, may necessarily include combinations of the foregoing possibilities, which are in no way to be considered limiting.

[0071] In utilizing these gene sequences for the assays according to the invention, the genes whose activity is to be determined with and without the presence of the compound to be evaluated for antitumor activity may be any one, or several, or any combination of the gene sequences disclosed herein as SEQ ID NO: 1-1001. However, how the gene sequences are employed in such assays depends on the pattern of gene expression disclosed for the signature sets. For example, a sequence that is expressed in cancerous cells but not in normal cells will identify a potential anticancer agent by that agent's ability to decrease expression of the sequence, or sequences, in tumor cells. Conversely, a sequence, or sequences, expressed in normal but not tumor cells will identify a potential antitumor agent by its ability to increase expression of those genes in the tumor cells. The same relationship holds true where the sequences are expressed in both cancer and normal cells but are expressed at a higher level in one than in the other, and vice versa. Based on the expression patterns disclosed for the gene sequences and signature sets disclosed herein, it should be readily apparent to those skilled in the art how to conduct assays for potential antitumor agents using the signature gene sets. The same holds true where the sequences, or signature gene sets, are utilized to determine the cancerous state of a cell or use of an agent to treat a cancerous condition.

[0072] Thus, in one aspect, the present invention relates to a process for screening for an anti-neoplastic agent comprising the steps of (a) exposing cells to a chemical agent to be tested for antineoplastic activity, and (b) determining a change in expression of at least one gene of a signature gene set, or a sequence that is at least 90%, preferably at least 95% identical thereto, wherein a change in expression is indicative of anti-neoplastic activity. Such change in expression is intended to mean a change that includes any activity of the gene, and may be an increase or decrease thereof. In addition, such change in activity may be a change in expression or other activity of at least 1 such gene, such as 5 or 10, or more of the genes of a signature set, even as many as half of such genes or even of all of the genes of a particular gene set.

[0073] The gene expression to be measured is commonly assayed using RNA expression as an indicator. Thus, the greater the level of RNA (such as a messenger RNA) detected the higher the level of expression of the corresponding gene. Thus, gene expression, either absolute or relative, such as where the expression of several different genes are being quantitatively evaluated and compared, for example, where chemical agents modulate the expression of more than one gene, such as a set of 3, 4, 5, or more genes, is determined by the relative expression of the RNAs encoded by such genes.

[0074] RNA may be isolated from samples in a variety of ways, including lysis and denaturation with a phenolic solution containing a chaotropic agent (e.g., triazol) followed by isopropanol precipitation, ethanol wash, and resuspension in aqueous solution; or lysis and denaturation followed by isolation on solid support, such as a Qiagen resin and reconstitution in aqueous solution; or lysis and denaturation in non-phenolic, aqueous solutions followed by enzymatic conversion of RNA to DNA template copies.

[0075] Normally, prior to applying the processes of the invention, steady state RNA expression levels for the genes, and sets of genes, disclosed herein will have been obtained. It is the steady state level of such expression that is affected by potential anti-neoplastic agents as determined herein. Such steady state levels of expression are easily determined by any methods that are sensitive, specific and accurate. Such methods include, but are in no way limited to, real time quantitative polymerase chain reaction (PCR), for example, using a Perkin-Elmer 7700 sequence detection system with gene specific primer probe combinations as designed using any of several commercially available software packages, such as Primer Express software, solid support based hybridization array technology using appropriate internal controls for quantitation, including filter, bead, or microchip based arrays, solid support based hybridization arrays using, for example, chemiluminescent, fluorescent, or electrochemical reaction based detection systems.

[0076] In one embodiment of the present invention, a set of genes useful in evaluating, or screening, or otherwise assaying, one or more chemical agents for anti-neoplastic activity in the assays disclosed herein will have already been shown to have differences in the ratios of steady state RNA levels in cancer cells, or tissues, relative to normal, or non-tumorous cells or tissues, or will have exhibited differences in the expression ratios in tumor samples compared to normal samples between genes in a given subset of the set of genes disclosed herein, or will have gene expression that has increased from undetectable levels to detectable levels, or vice versa, as the case may be, especially where sensitive detection methods are employed, or conversely will have decreased from detectable levels to undetectable levels with such procedures, especially sensitive procedures.

[0077] The genes, and gene sequences, useful in practicing the methods of the present invention are genes that are found to be selectively expressed in, or not expressed in, cancer cells as compared to non-cancer cells, or in which expression is down-regulated or up-regulated, as the case may be, in cancerous cells as compared to non-cancerous cells. Thus, these may include genes, or sets of genes, expressed in cancer cells but absent from, or inactive in, non-cancerous cells, or may include genes, or sets of genes, expressed in non-cancerous cells, but not expressed in cancer cells. Alternatively, the genes useful in practicing the present invention may be more expressed, or less expressed, in a cancerous cell relative to a non-cancerous cell. Such genes are generally those comprising the sequences of SEQ ID NO: 1-1001, with SEQ ID NO: 146-215, 504-686 and 760-1001 exhibiting elevated expression in cancer cells related to normal cells and vice versa for SEQ ID NO: 1-145, 216-503 and 687-759.

[0078] In accordance with the foregoing, the present invention further relates to a process for determining the cancerous status of a test cell, comprising determining expression in said test cell of at least one gene that corresponds to, or includes, one of the nucleotide sequences selected from the sequences of SEQ ID NO: 1-1001, or a nucleotide sequence that is at least 90%, preferably at least 95%, identical thereto, and then comparing said expression to expression of said at least one gene in at least one cell known to be non-cancerous whereby a difference in said expression indicates that said cell is cancerous.

[0079] In a particular embodiment, the present invention is directed to a process for determining the cancerous status of a cell to be tested, comprising determining the presence in said cell of at least one gene that includes one of the nucleotide sequences selected from the sequences of SEQ ID NO: 1-1001, including sequences having substantial identity homologous to said sequences, or characteristic fragments thereof, or the complements of any of the foregoing and then comparing the pattern of said gene presence and/or absence with that found for a cell known, or believed, to be non-cancerous, or normal, at least with respect to its genetic complement.

[0080] With respect to genes that correspond to at least one of the sequences of SEQ ID NO: 146-215, 504-686 and 760-1001, up regulation of expression in cancer cells (as compared to non-cancer cells, which may lack said genes, or said gene expression, altogether) is indicative of a cancerous, or potentially cancerous, condition.

[0081] In specific embodiments, the present invention relates to embodiments wherein the genetic pattern is the modulation of expression of more than one gene, preferably 3, 4, or 5 genes, and even includes patterns where there is a modulation of expression of as many as 10, or more, genes. Thus, where a genetic pattern is the modulation of expression of 5 genes in a cancerous cell as compared to a non-cancerous cell from the same tissue type, such as a cancerous kidney cell, versus a non-cancerous cell of kidney, such a pattern indicates a likelihood that such genes (i.e., the modulation of expression of those 5 genes) is an indicator of cancerous status and thereby provides a means of diagnosing a cancerous, or potentially cancerous, status. The absence of a specific set of genes from cancerous cells where said genes are present in otherwise normal cells, especially those of a similar type, is also indicative of a correlation with the cancerous state and thus can likewise be used as a means of diagnosing the cancerous state in other cells suspected of being cancerous.

[0082] In a particular embodiment, the gene sequences as disclosed herein are indicative of the cancerous or normal state of kidney tissues. This further includes SEQ ID NO: 1-1001 for kidney, wherein SEQ ID NO: 1-145 represent genes or gene sequences expressed in normal kidney but not in clear cell carcinoma of the kidney, wherein SEQ ID NO: 146-215 represent genes or gene sequences expressed in clear cell carcinoma cells but not in normal kidney cells, wherein SEQ ID NO: 216-503 represent genes or gene sequences expressed in normal kidney cells but not in renal cell carcinoma of the kidney, wherein SEQ ID NO: 504-686 represent genes or gene sequences expressed in renal cell carcinoma but not in normal kidney, wherein SEQ ID NO: 687-759 represent genes or gene sequences expressed in normal kidney but not in Wilm's tumor cells, and wherein SEQ ID NO: 760-1001 represent genes or gene sequences expressed in Wilm's tumor but not in normal kidney cells.

[0083] The gene patterns indicative of a cancerous state need not be characteristic of every cell found to be cancerous. Thus, the methods disclosed herein are useful for detecting the presence of a cancerous condition within a tissue where less than all cells exhibit the complete pattern. For example, a set of selected genes, comprising sequences homologous under stringent conditions (i.e., at least 95% identical) to at least one of the sequences of SEQ ID NO: 146-215, 504-686 and 760-1001 and wherein the signature set is comprised of genes expressed and/or up-regulated in cancer cells relative to normal cells, as disclosed above for the signature gene set (or sets) used for practicing the invention, may be found, using appropriate probes, either DNA or RNA, to be present in as little as 60% of cells derived from a sample of tumorous, or malignant, tissue while being absent from as much as 60% of cells derived from corresponding non-cancerous, or otherwise normal, tissue (and thus being present in as much as 40% of such normal tissue cells). In a preferred embodiment, such gene pattern is found to be present in at least 70% of cells drawn from a cancerous tissue and absent from at least 70% of a corresponding normal, non-cancerous, tissue sample. In an especially preferred embodiment, such gene pattern is found to be present in at least 80% of cells drawn from a cancerous tissue and absent from at least 80% of a corresponding normal, non-cancerous, tissue sample. In a most preferred embodiment, such gene pattern is found to be present in at least 90% of cells drawn from a cancerous tissue and absent from at least 90% of a corresponding normal, non-cancerous, tissue sample. In an additional embodiment, such gene pattern is found to be present in at least 100% of cells drawn from a cancerous tissue and absent from at least 100% of a corresponding normal, non-cancerous, tissue sample, although the latter embodiment may represent a rare occurrence.

[0084] Conversely, where the signature set (such as SEQ ID NO: 1-145, 216-503 and 687-759) is expressed or up-regulated in normal cells versus cancerous cells, as disclosed herein, expression in the normal cells but not in suspected cancerous cells may confirm a cancerous state in a suspected cancerous sample where the cells would show lower than expected expression of genes corresponding to one of these sequences.

[0085] Although the presence or absence of expression of one or more selected gene sequences may be indicative of a cancerous status for a given cell, the mere presence or absence of such a gene pattern may not alone be sufficient to achieve a malignant condition and thus the level of expression of such gene pattern may also be a significant factor in determining the attainment of a cancerous state. While a pattern of gene expression may be present in both cancerous and non-cancerous cells, the relative level of expression, as determined by any of the methods disclosed herein, all of which are well known in the art, may differ between the cancerous versus the non-cancerous cells. Thus, it becomes essential to also determine the level of expression of one or more of said genes as a separate means of diagnosing the presence of a cancerous status for a given cell, groups of cells, or tissues, either in culture or in situ.

[0086] In accordance with the invention disclosed herein, a determination of an anticancer agent using the signature gene sets for kidney described herein is based on patterns of modulation of such genes so that increase or decrease in expression of a gene due to the presence of such a potential agent may or may not be meaningful. Thus, the more genes in a gene set as disclosed herein that are affected by said agent the more likely said agent is an effective therapeutic agent.

[0087] In addition, different agents may have different abilities to affect the genes of a signature gene set. For example, if a potential therapeutic agent, say, agent A, causes a gene or group of genes of a characteristic or signature gene set, or even all of the genes of said gene set, to exhibit decreased expression, such as where a lower amount of mRNA is expressed from said gene(s), or less protein is produced from said mRNA, but a second potential agent, say, agent B, while modulating the activity of the same or related genes causes said expression to be reduced to half, such as where only half as much mRNA is transcribed or only half as much protein is translated from said mRNA as for agent A, then agent B is considered to have twice as much therapeutic potential as agent A.

[0088] Such modulation or change of activity as determined using the assays disclosed herein may include either an increase or a decrease in activity of said genes or gene sequences. Thus, where a gene is expressed in cancer cells but not in normal cells, or is up-regulated in cancer cells relative to normal cells, of the same organ or tissue type, an agent that down-regulates said gene or genes, or gene sequences, or prevents their expression entirely, is considered a potential antitumor agent within the present disclosure. Conversely, where an agent causes expression of a gene or genes, or gene sequences, expressed in normal cells but not in cancer cells, or where said agent up-regulates a gene or genes, or gene sequences, that are expressed in normal cells but not in cancer cells, or are up-regulated in normal cells but not in cancer cells, of the same organ or tissue type, said agent is considered to be a potential antitumor agent within the present disclosure.

[0089] The present invention also relates to a process that comprises a method for producing a product comprising identifying an agent according to one of the disclosed processes for identifying such an agent (such as the therapeutic agents identified according to the assay procedures disclosed herein) wherein said product is the data collected with respect to said agent as a result of said identification process, or assay, and wherein said data is sufficient to convey the chemical character and/or structure and/or properties of said agent. For example, the present invention specifically contemplates a situation whereby a user of an assay of the invention may use the assay to screen for compounds having the desired enzyme modulating activity and, having identified the compound, then conveys that information (i.e., information as to structure, dosage, etc) to another user who then utilizes the information to reproduce the agent and administer it for therapeutic or research purposes according to the invention. For example, the user of the assay (user 1) may screen a number of test compounds without knowing the structure or identity of the compounds (such as where a number of code numbers are used the first user is simply given samples labeled with said code numbers) and, after performing the screening process, using one or more assay processes of the present invention, then imparts to a second user (user 2), verbally or in writing or some equivalent fashion, sufficient information to identify the compounds having a particular modulating activity (for example, the code number with the corresponding results). This transmission of information from user 1 to user 2 is specifically contemplated by the present invention.

[0090] In accordance with the foregoing, the present invention further relates to a process for determining the cancerous status of a cell to be tested, comprising determining the level of expression in said cell of at least one gene that includes one of the nucleotide sequences selected from the sequences of SEQ ID NO: 1-1001, including sequences substantially identical to said sequences, or characteristic fragments thereof, or the complements of any of the foregoing and then comparing said expression to that of a cell known to be non-cancerous whereby the difference in said expression indicates that said cell to be tested is cancerous.

[0091] In specific embodiments of the present invention, said expression is determined for more than one of said genes, such as 2, 3, 4, 5, or more such genes, considered as a set, and even as many as a set of 10 such genes. A set of genes, for example, 5 such genes, may be found to be expressed at certain levels in cancer cells but are found to be expressed at lower levels (or not expressed at all) in non-cancerous, or normal, cells. Conversely, a set of, for example, 5 such genes may be found to be expressed in normal (i.e., non-cancerous) cells but expressed at lower levels (or not expressed at all) in cancer cells. Thus, by determining the set or pattern of genes expressed in cancer cells but expressed at lower levels (or not at all) in non-cancer, or vice versa, a method is achieved for diagnosing cancerous conditions wherein said genes are selected from those that include one of the sequences, or fragments of sequences, including complementary sequences, selected from SEQ ID NO: 1-1001. Using the methods disclosed herein, kidney or other cancers can be readily detected using the methods of the present invention.

[0092] In accordance with the invention, although gene expression for a gene that includes as a portion thereof one of the nucleotide sequences of SEQ ID NO: 1-1001, is preferably determined by use of a probe that is a fragment of such nucleotide sequence, it is to be understood that the probe may be formed from a different portion of the gene. Thus, for each gene of the signature set of the present invention, the nucleotide sequence disclosed with respect to a specific sequence ID number may be only a portion of the nucleotide sequence that encodes expression of the gene. As a result, expression of the gene may be determined by use of a nucleotide probe that hybridizes to messenger RNA (mRNA) transcribed from a portion of the gene other than the specific nucleotide sequence disclosed with reference to a sequence ID number as recited herein.

[0093] The present invention further relates to a process for determining a cancer initiating, facilitating or suppressing gene comprising the steps of contacting a cell with a cancer modulating agent and determining a change in expression of a gene selected from the group consisting of the gene sequences of SEQ ID NO: 1-1001 and thereby identifying said gene as being a cancer initiating or facilitating gene.

[0094] Thus, some or all of the genes within the signature gene sets disclosed herein as SEQ ID NO: 1-1001 are found to play a direct role in the initiation or progression of cancer or even other diseases and disease processes. Because changes in expression of these genes (either up-regulation or down-regulation) are linked to the disease state (i.e. cancer), the change in expression may contribute to the initiation or progression of the disease. For example, if a gene that is up-regulated is an oncogene, or if a gene that is down-regulated is a tumor suppressor, such a gene provides for a means of screening for small molecule therapeutics beyond screens based upon expression output alone. For example, genes that display up-regulation in cancer and whose elevated expression contributes to initiation or progression of disease represent targets in screens for small molecules that inhibit or block their function. Examples include, but are not be limited to, kinase inhibition, cellular proliferation, substrate analogs that block the active site of protein targets, etc. Similarly, genes that display down-regulation in cancer and whose absence results in initiation or progression of disease are valuable therapeutics for gene therapy.

[0095] In accordance therewith, the present invention relates to a process for determining a cancer initiating or facilitating gene comprising contacting a cell expressing a test gene (one whose status as a cancer initiating or facilitating gene is to be determined) with an agent that decreases the expression of a gene corresponding to a polynucleotide having a sequence selected from the group consisting of SEQ ID NO: 146-215, 504-686 and 760-1001, and detecting a decrease in expression of said test gene compared to when said agent is not present, thereby identifying said test gene as being a cancer initiating or facilitating gene. Such genes may, of course, be oncogenes and said decrease in expression may be due to a decrease in copy number of said gene in said cell or a cell derived from said cell, such as where copy number is reduced following cellular replication.

[0096] The present invention also relates to a process for determining a cancer suppressor gene comprising contacting a cell expressing a test gene (one whose status as a cancer suppressor gene is to be determined) with an agent that increases the expression of a gene that encodes an RNA at least 95% identical to an RNA encoded by (i.e., corresponds to) a polynucleotide having a sequence selected from the group consisting of SEQ ID NO: 1-145, 216-503 and 687-759 and detecting an increase in expression of said test gene compared to when said agent is not present, thereby identifying said test gene as being a cancer suppressor gene. The sequence identity may include identical sequences, as defined herein, and such a process includes embodiments wherein the increase in expression is due to an increase in copy number of the gene in said cell or a cell derived from said cell, such as by cellular replication. Such increase in expression may also include the induction of expression in a cell, especially a cancer cell, such as a kidney cancer cell, where such expression is not detectable in the absence of the agent.

[0097] It should be noted that there are a variety of different contexts in which genes have been evaluated as being involved in the cancerous process. Thus, some genes may be oncogenes and encode proteins that are directly involved in the cancerous process and thereby promote the occurrence of cancer in an animal. In addition, other genes may serve to suppress the cancerous state in a given cell or cell type and thereby work against a cancerous condition forming in an animal. Other genes may simply be involved either directly or indirectly in the cancerous process or condition and may serve in an ancillary capacity with respect to the cancerous state. All such types of genes are deemed with those to be determined in accordance with the invention as disclosed herein. Thus, the gene determined by said process of the invention may be an oncogene, or the gene determined by said process may be a cancer facilitating gene, the latter including a gene that directly or indirectly affects the cancerous process, either in the promotion of a cancerous condition or in facilitating the progress of cancerous growth or otherwise modulating the growth of cancer cells, either in vivo or ex vivo. In addition, the gene determined by said process may be a cancer suppressor gene, which gene works either directly or indirectly to suppress the initiation or progress of a cancerous condition. Such genes may work indirectly where their expression alters the activity of some other gene or gene expression product that is itself directly involved in initiating or facilitating the progress of a cancerous condition. For example, a gene that encodes a polypeptide, either wild or mutant in type, which polypeptide acts to suppress of tumor suppressor gene, or its expression product, will thereby act indirectly to promote tumor growth.

[0098] In accordance with the foregoing, the process of the present invention includes cancer modulating agents that are themselves either polypeptides, or small chemical entities, that affect the cancerous process, including initiation, suppression or facilitation of tumor growth, either in vivo or ex vivo. Said cancer modulating agent may have the effect of increasing gene expression or said cancer modulating agent may have the effect of decreasing gene expression as such terms have been described herein.

[0099] In keeping with the present disclosure, the present invention also relates to a process for treating cancer comprising contacting a cancerous cell with an agent having activity against an expression product encoded by a gene sequence selected from the group consisting of SEQ ID NO: 1-1001. More specifically, the present invention relates to a process for treating cancer comprising contacting a cancerous cell with an agent having activity against an expression product encoded by a gene sequence selected from the group consisting of SEQ ID NO: 146-215, 504-686 and 760-1001. Such a process includes an embodiment wherein the cancerous cell is contacted in vivo. Such treatment includes treatment of a patient, such as a human being. The agent may include an antibody that reacts with a polypeptide encoded by such a gene.

[0100] Thus, some or all of the genes within these signature gene sets represent individual targets for therapeutic intervention, based at least in part on their pattern(s) of expression. For example, genes within the signature gene sets that encode cell surface molecules and are up-regulated in cancer as compared to normal cells. The proteins encoded by such genes, due to their elevated expression in cancer cells, represent highly useful therapeutic targets for “targeted therapies” utilizing such affinity structures as, for example, antibodies coupled to some cytotoxic agent. In such methodology, it is advantageous that nothing need be known about the endogenous ligands or binding partners for such cell surface molecules. Rather, an antibody or equivalent molecule that can specifically recognize the cell surface molecule (which could include an artificial peptide, a surrogate ligand, and the like) that is coupled to some agent that can induce cell death or a block in cell cycling offers therapeutic promise against these proteins. Thus, such approaches include the use of so-called suicide “bullets” against intracellular proteins.

[0101] The process of the present invention includes embodiments of the above-recited process wherein said cancer cell is contacted in vivo as well as ex vivo, preferably wherein said agent comprises a portion, or is part of an overall molecular structure, having affinity for said expression product. In one such embodiment, said portion having affinity for said expression product is an antibody, especially where said expression product is a polypeptide or oligopeptide or comprises an oligopeptide portion, or comprises a polypeptide.

[0102] Such an agent can therefore be a single molecular structure, comprising both affinity portion and anti-cancer activity portions, wherein said portions are derived from separate molecules, or molecular structures, possessing such activity when separated and wherein such agent has been formed by combining said portions into one larger molecular structure, such as where said portions are combined into the form of an adduct. Said anti-cancer and affinity portions may be joined covalently, such as in the form of a single polypeptide, or polypeptide-like, structure or may be joined non-covalently, such as by hydrophobic or electrostatic interactions, such structures having been formed by means well known in the chemical arts. Alternatively, the anti-cancer and affinity portions may be formed from separate domains of a single molecule that exhibits, as part of the same chemical structure, more than one activity wherein one of the activities is against cancer cells, or tumor formation or growth, and the other activity is affinity for an expression product produced by expression of genes related to the cancerous process or condition.

[0103] In one embodiment of the present invention, a chemical agent, such as a protein or other polypeptide, is joined to an agent, such as an antibody, having affinity for an expression product of a cancerous cell, such as a polypeptide or protein encoded by a gene related to the cancerous process, especially a gene sequence corresponding to one selected from the group consisting of the sequences of SEQ ID NO: 146-215, 504-686 and 760-1001. In a specific embodiment, said expression product is a cell surface receptor, such as a protein or glycoprotein or lipoprotein, present on the surface of a cancer cell, such as where it is part of the plasma membrane of said cancer cell, and acts as a therapeutic target for the affinity portion of said anticancer agent and where, after binding of the affinity portion of such agent to the expression product, the anti-cancer portion of said agent acts against said expression product so as to neutralize its effects in initiating, facilitating or promoting tumor formation and/or growth. In a separate embodiment of the present invention, binding of the agent to said expression product may, without more, have the effect of deterring cancer promotion, facilitation or growth, especially where the presence of said expression product is related, either intimately or only in an ancillary manner, to the development and growth of a tumor. Thus, where the presence of said expression product is essential to tumor initiation and/or growth, binding of said agent to said expression product will have the effect of negating said tumor promoting activity. In one such embodiment, said agent is an apoptosis-inducing agent that induces cell suicide, thereby killing the cancer cell and halting tumor growth.

[0104] In alternative embodiments of the foregoing, the present invention relates to a process for treating a cancerous condition in an animal afflicted therewith comprising administering to said animal a therapeutically effective amount of an agent first identified as having anti-neoplastic activity using an assay process as disclosed herein according to the present invention, such as a cancer-related gene modulator as identified according to the processes of the invention. Such processes also include the ability to protect against development of a cancerous state by using agents identified by the assay processes of the invention. Thus, the present invention specifically contemplates a process for protecting an animal against cancer comprising administering to an animal at risk of developing cancer a therapeutically effective amount of an agent first identified as having anti-neoplastic activity using one or more of the assay processes disclosed herein for identifying such agents.

[0105] The processes of the present invention take advantage of the correlation of changes in mRNA expression profiles of these signature gene sets with potential (depending on the form of cancer) changes in DNA copy number of the chromosomal regions wherein these genes are located. Of course, the precise nature of the change in mRNA expression (e.g. a signature set of genes that are up-regulated at the transcriptional level) may also indicate a change in the DNA copy number for the genomic regions in which these genes are located (e.g. an amplification of the genomic DNA region that contains the involved gene or genes).

[0106] Many cancers contain chromosomal rearrangements, which typically represent translocations, amplifications, or deletions of specific regions of genomic DNA. A recurrent chromosomal rearrangement that is associated with a specific stage and type of cancer always affects a gene (or possibly genes) that play a direct and critical role in the initiation or progression of the disease. Many of the known oncogenes or tumor suppressor genes that play direct roles in cancer have either been initially identified based upon their positional cloning from a recurrent chromosomal rearrangement or have been demonstrated to fall within a rearrangement subsequent to their cloning by other methods. In all cases, such genes display amplification at both the level of DNA copy number and at the level of transcriptional expression at the mRNA level.

[0107] At least some of the genes that are contained within signature gene sets disclosed herein (SEQ ID NO: 146-215, 504-686 and 760-1001) display changes in their mRNA expression profiles (depending on the precise reading frame involved) within cancer samples due, in part, to changes in their DNA copy number as a result of specific chromosomal rearrangements in those cancer cells. The utilities that follow from this are (i) that the genes contained within these signature gene sets offer a time saving shortcut to the identification of novel chromosomal rearrangements, amplifications, or deletions that are associated with cancer, and/or (ii) represent key genes affected by such chromosomal rearrangements, amplifications, or deletions and, therefore, play a key role in the initiation or progression of the disease. Genes within the signature sets that identify changes in the DNA copy number (based upon their changes in expression at the mRNA level) afford an entry point into other forms of diagnostic assay for the initiation, staging, or progression of cancer to be conducted in tissue samples at the DNA level (e.g. if gene X identifies a novel chromosomal amplification associated with cancer, then that specific chromosomal region defined by gene X would serve as the basis for a diagnostic assay for cancer, where genomic DNA is extracted from tissue samples and evaluated for the presence of the specific amplification), and also the rapid positional cloning of genes that play vital and direct roles in the initiation or progression of cancer.

[0108] In one embodiment of the present invention, said change in expression may be determined by determining a change in gene copy number, wherein said change in copy number is an increase in copy number or wherein said change in copy number is a decrease in copy number. For example, copy number of a sequence expressed, or over-expressed, in a cancerous cell may be decreased due to the presence of an anti-neoplastic agent as identified according to the assays procedures of the present invention.

[0109] A change in gene copy number may be determined by determining a change in expression of messenger RNA encoded by a particular gene sequence, especially where said sequence is one selected from the group consisting of the sequences of SEQ ID NO: 1-1001, especially SEQ ID NO: 146-215, 504-686 and 760-1001 (the latter being expressed in cancer cells but not expressed at detectable levels in normal cells) and 1-145, 216-503 and 687-759 (the latter being expressed in normal cells but not at detectable levels in cancer cells). Also in accordance with the present invention, said gene may be a cancer initiating gene, a cancer facilitating gene, or a cancer suppressing gene. In carrying out the methods of the present invention, a cancer facilitating gene is a gene that, while not directly initiating or suppressing tumor formation or growth, said gene acts, such as through the actions of its expression product, to direct, enhance, or otherwise facilitate the progress of the cancerous condition, including where such gene acts against genes, or gene expression products, that would otherwise have the effect of decreasing tumor formation and/or growth.

[0110] The present invention also relates to a process for treating cancer comprising inserting into a cancerous cell a gene construct comprising an anti-cancer gene operably linked to a promoter or enhancer element such that expression of said anti-cancer gene causes suppression of said cancer and wherein said promoter or enhancer element is a promoter or enhancer element modulating a gene, or genes, corresponding to a sequence, or sequences, selected from the group consisting of the sequences of SEQ ID NO: 1-145, 216-503 and 687-759.

[0111] The signature sets or signature gene sets disclosed herein are useful in identifying genetic regulatory elements within the promoters of the genes contained within the signature sets that are specific to normal tissue and/or the corresponding cancer. Each signature set is a collection of genes that share a gross common pattern of transcriptional regulation in cancer vs. normal (e.g. a signature set of genes that are transcriptionally up-regulated in cancer).

[0112] In one such embodiment, analyzing and comparing the DNA sequences of the promoter regions of all the genes contained within the signature set serves to identify conserved stretches or motifs of sequences within subsets of genes that represent cis-acting elements that specifically drive a form of gene expression (e.g. increased transcriptional expression in cancer). The identification of such cis-acting regulatory elements is then available for use in driving the cancer-specific expression of suicide genes or toxins via genetic therapy using technology already well known in the art.

[0113] In separate embodiments, said anti-cancer gene is a cancer suppressor gene or encodes a polypeptide having anticancer activity, especially where said polypeptide has apoptotic activity.

[0114] In additional embodiments, such insertion of the gene construct into a cancerous cell is accomplished in vivo, for example using a viral or plasmid vector. Such methods can also be applied to in vitro uses. The methods of the present invention are readily applicable to different forms of gene therapy, either where cells are genetically modified ex vivo and then administered to a host or where the gene modification is conducted in vivo using any of a number of suitable methods involving vectors especially suitable to such therapies, such as the use of special viral vectors, including adeno-associated viruses and adenoviruses, as well as retroviruses and specially constructed plasmids to accomplish such therapies. The use of these and other vectors is well known to those skilled in the art and need not be described further.

[0115] The present method also relates to a process for determining functionally related genes comprising contacting one or more gene sequences selected from the group consisting of the sequences of SEQ ID NO: 1-1001 with an agent that modulates expression of more than one gene in such group and thereby determining a subset of genes of said group.

[0116] In accordance with the present invention, said functionally related genes are genes modulating the same metabolic pathway or said genes are genes encoding functionally related polypeptides. In one such embodiment, said genes are genes whose expression is modulated by the same transcriptional activator or enhancer sequence, especially where said transcriptional activator or enhancer increases, or otherwise modulates, the activity of a gene sequence selected from the group consisting of SEQ ID NO: 1-1001. In specific embodiments, the sequences may be SEQ ID NO: 146-215, 504-686 and 760-1001 or may be SEQ ID NO: 1-145, 216-503 and 687-759, or subsets of any of these.

[0117] In one such embodiment, small molecule screens serve to identify changes in expression of genes within a signature set and thereby provide a tool for the identification of specific functional pathways and a means of assigning defined functions to novel genes.

[0118] In situations where a signature set of genes that are transcriptionally up-regulated in cancer cells compared to normal cells, such screens facilitate the identification of small molecules that down-regulate the expression of the genes of the signature set within cancer cells. While such therapeutics make a cancer cell “look” more normal, based upon the expression of the genes within the signature set, what actually happens when such screens are put into practice is that all genes within the signature sets do not respond identically to each small molecule within a chemical compound library. If an average signature set contains 200 different genes, for example, and the expression of all 200 genes is monitored in response to a library of some 50,000 chemical compounds, and subsets of genes within the signature set consistently change their patterns of expression in response to particular chemicals (e.g., 10 of the genes always change expression in a coordinated way, such as down-regulation of one gene within the group of 10) then it always causes the down-regulation of the other 9 specific genes as well.

[0119] Such subsets or subgroups of genes within each signature set that change their expression in a coordinated way in response to chemical compounds represent genes that are located within a common metabolic, signaling, physiological, or functional pathway so that by analyzing and identifying such subsets one can (a) assign known genes and novel genes to specific pathways and (b) identify specific functions and functional roles for novel genes that are grouped into pathways with genes for which their functions are already characterized or described. For example, one might identify a subgroup of 10 genes within a signature set (5 known genes and 5 novel genes) that change expression in a coordinated fashion and for which the 5 known genes are involved in apoptosis thereby implicating the other 5 novel genes as playing a role in apoptotic cellular processes. Therefore, the processes disclosed according to the present invention at once provide a novel means of assigning function to genes, i.e. a novel method of functional genomics, and a means for identifying chemical compounds that have potential therapeutic effects on specific cellular pathways. Such chemical compounds may have therapeutic relevance to a variety of diseases outside of cancer as well, in cases where such diseases are known or are demonstrated to involve the specific cellular pathway that is affected.

[0120] It should be cautioned that, in carrying out the procedures of the present invention as disclosed herein, any reference to particular buffers, media, reagents, cells, culture conditions and the like are not intended to be limiting, but are to be read so as to include all related materials that one of ordinary skill in the art would recognize as being of interest or value in the particular context in which that discussion is presented. For example, it is often possible to substitute one buffer system or culture medium for another and still achieve similar, if not identical, results. Those of skill in the art will have sufficient knowledge of such systems and methodologies so as to be able, without undue experimentation, to make substitutions that will optimally serve their purposes in using the methods and procedures disclosed herein.

[0121] The present invention will now be further described by way of the following non-limiting example but it should be kept clearly in mind that other and different embodiments of the methods disclosed according to the present invention will no doubt suggest themselves to those of skill in the relevant art.

### EXAMPLE

[0122] SW480 cells (or other sells of choice, cancerous or normal, such as kidney cancer cells or cell lines) are grown to a density of 226 cells/cm² in Leibovitz's L-15 medium supplemented with 2 mM L-glutamine (90%) and 10% fetal bovine serum. The cells are collected after treatment with 0.25% trypsin, 0.02% EDTA at 37° C. for 2 to 5 minutes. The trypsinized cells are then diluted with 30 ml growth medium and plated at a density of 50,000 cells per well in a 96 well plate (200 μl/well). The following day, cells are treated with either compound buffer alone, or compound buffer containing a chemical agent to be tested, for 24 hours. The media is then removed, the cells lysed and the RNA recovered using the RNAeasy reagents and protocol obtained from Qiagen. RNA is quantitated and 10 ng of sample in 1 μl are added to 24 μl of Taqman reaction mix containing 1× PCR buffer, RNAsin, reverse transcriptase, nucleoside triphosphates, amplitaq gold, tween 20, glycerol, bovine serum albumin (BSA) and specific PCR primers and probes for a reference gene (18S RNA) and a test gene (Gene X). Reverse transcription is then carried out at 48° C. for 30 minutes. The sample is then applied to a Perkin Elmer 7700 sequence detector and heat denatured for 10 minutes at 95° C. Amplification is performed through 40 cycles using 15 seconds annealing at 60° C. followed by a 60 second extension at 72° C. and 30 second denaturation at 95° C. Data files are then captured and the data analyzed with the appropriate baseline windows and thresholds.

[0123] The quantitative difference between the target and reference genes is then calculated and a relative expression value determined for all of the samples used. This procedure is then repeated for each of the target genes in a given signature, or characteristic, set and the relative expression ratios for each pair of genes is determined (i.e., a ratio of expression is determined for each target gene versus each of the other genes for which expression is measured, where each gene's absolute expression is determined relative to the reference gene for each compound, or chemical agent, to be screened). The samples are then scored and ranked according to the degree of alteration of the expression profile in the treated samples relative to the control. The overall expression of the set of genes relative to the controls, as modulated by one chemical agent relative to another, is also ascertained. Chemical agents having the most effect on a given gene, or set of genes, are considered the most anti-neoplastic.

[0124] In carrying out the methods of the invention, it is to be expected that not all cells of a given sample of suspected cancerous cells will express all, or even most, of these genes but that a substantial expression thereof in a substantial number of such cells is sufficient to warrant a determination of a cancerous, or potentially cancerous, condition. The sequences disclosed herein are represented by SEQ ID NO: 1 to 1001 although different genes are more or less relevant to different organs and tissues and some may be up-regulated in cancer and not normal cells while others are up-regulated in normal cells but not cancerous cells. The sequences presented herein may be genomic, synthetic or cDNA sequences and may also be represented as RNA sequences. The sequences of the sequence listing herein are mostly cDNA sequences but can be used to locate genomic sequences.

The application's sequence listing, which the Patent Office published only in electronic form, follows.

SEQUENCE LISTING (1001 sequences)

SEQ ID NO: 1 - DNA, 556 bp, Homo sapiens
  misc_feature (1)...(556): n=a,t,g or c
cacgaggaggccaccctgggggcgtttctcatctgtgagctctgccagtgtatccagcacacggaagacatggagaacgagatcgacgagctgctgcaggagttcgaggagaagagtggccgcacctttctgcacaccgtctgcttctactgagcccagcgcccgcatggagccgcctctggagcttcctgttgttcatactttttccttcctgacatttgtttttacttacaggtgttctgctggtgacggtagcattacccaaataaactgtgcatatgaaatgggagaggagatgccaaaacgccagatgaaagcaatcaagtttcttcttttccacttttacttatgagcaggatattgattacaaagtttttcttctttaaccaaaaaggaaagacaacggtttgtgtgcacttcccgacatacctgtgtcttcgtgtgcctgccttccctccctcctccccaccgggccggactgtacagagccctgctgcggcgtgttaggaatgacctggaattgtcaataaacagatgctgctgtcaanaaaagaaa

SEQ ID NO: 2 - DNA, 379 bp, Homo sapiens
gagaaaacagcaacaagctgagctgctgtgacagaggggaacaagatggcggcgccgaaggggagcctctgggtgaggacccaactggggctcccgccgctgctgctgctgaccatggccttggccggaggttcggggaccgcttcggctgaagcatttgactcggtctctgggtgatacggcgtcttgccaccgggcctgtcagttgacctaccccttgcacacctaccctaaggaagaggagttgtacgcatgtcagagaggttgcaggctgttttcaatttgtcagtttgtggatgatggaattgacttaaatcgacctaaattggaatgtgaatctgcatgtacagaagcatattcccaatctgatgagcaatat

SEQ ID NO: 3 - DNA, 462 bp, Homo sapiens
  misc_feature (1)...(462): n=a,t,g or c
tgaacatgatgctaaccctgacaggatgaaggaaagtaatattctttcagtgtagttcaggagagcatttgttttcttttctaccaattaacccatcattgcttttaaacaaccatctnaaggagcagagaggcagggtagaagacagaagggggatctatgtggtaactaaagaatgtttctgttttgttaattattgtgtgtgtgtggttttattgtttgcttaagagaatcaaaaactgaaaaaaatgagaatacaggaaatggctcttgtttatttttttgctgtgtttacagcttgttaatgctctactgtctttgtttcaagagagaattgntcactgcccagctcgctttgtgtccngagccctatggccaggccaccntgattaaatcatggcngtttaggatgtttganttttggacccgtttngccattggttatcnttaaaggngtaaaaa

SEQ ID NO: 4 - DNA, 465 bp, Homo sapiens
  misc_feature (1)...(465): n=a,t,g or c
gatcatcaggggttgtcaaggcctgaacgtgatgggctgtgatcttgtcgaagtttcaccaccgtatgatctttctgggaacacagccctgctggcggctaacctgctgtttgagatgctatgtgctctccccaaagtgacaaccgtctgagtcttgtgctcttcaagacaaaacagattgcgtcgctgacaagttctcaagaagaacttatgagtaagcagtctgagaactaaagagtttatgccaagaaaactttctgctgaaagtgtcattgctggctgtgaagtcgggataatcagtagaattctcacccaaacagcaacatttcttaagggaacttnggatttaattgggggggaaaaaaaagggagtacntgtaactngctttgatttttttttcctttggatggaaagatgggagggttaaagggtaagtgagggagnatttcttttcaagttatcta

SEQ ID NO: 5 - DNA, 3457 bp, Homo sapiens
cctccacctcccgggttcaagcgattctcctgcctcagcctcccgagtagctgagactacaggcacgcgccaccacgcccagctaatttttgtatctttagtagagacgggctttcaccatgttggccaggatggtctcgatgtcttaacgtcgtgatccggccgcctcggcctcccaagtgctgggattacaggcgttagccactgcgcccggccccagccaggcagttttaatcgagcgctcacaaccactgagacgcagcgaagcacccaccataatatcccaggaggccgaccgccggttcagactttttcttttctttaatccccgtccaagggatccgccctcaccccccaccccagccaccccaattccctattccctccccttggacggcgccggggaaaacaagctgctcgagctttatttcttcggtgcaaccaactcagaatgaattcctccgcccctgcgtgctcagtgagtcggcaccctagcagtgaactgcatttaaaacctcaggaattgagcgaactctcccagtggctctcctcaccgggatccccttccacgcctcctccccgtgccgcgcctcagtccgcactgctcattggccgcgtgcctgccaatccgatgcacgtcggctagggcaaagaccgcgaaaaagcgcgtacacctggctctgggagcgcgcgcctaacgccagccagcagcaggaggcgcgcgaggcaccacggcctggcggccgagagtcagggaggaacctcatttacataacggccgcccctctgtctcctggcgggggccggagtcccgcccctcgtccaacttgaaatctgttgggtcacgggccagtcactccgacctaggcaagcctgtggtggagctggaagagtttgtgagggcggtcccgggagcggattgggtctgggagttcccagaggcggctataagaaccgggaactgggcgcggggagctgagttgctggtagtgcccgtggtgcttggttcgaggtggccgttagttgactccgcggagttcatctccctggttttcccgtcctaacgtcgctcgcctttcagtcaggatgtctgcccgtggcccggctatcggcatcgacctgggcaccacctattcgtgcgtcggggtcttccaacatggcaaggtggagatcatcgccaacgaccagggcaatcgcaccacccccagctacgtggccttcacggacaccgagcgcctcatcggcgacgccgccaagaaccaggtggccatgaaccccaccaacaccatcttcgacgccaagaggctgattggacggaaattcgaggatgccacagtgcagtcggatatgaaacactggccgttccgggtggtgagcgagggaggcaagcccaaagtgcaagtagagtacaagggggagaccaagaccttcttcccagaggagatatcctccatggtcctcacgaagatgaaggagatcgcggaagcctacctggggggcaaggtgcacagcgcggtcataacggtcccggcctatttcaacgactcgcagcgccaggccaccaaggacgcaggcaccatcacggggctcaatgtgctgcgcatcatcaacgagcccacggcggcggccatcgcctacggcctggacaagaagggctgcgcgggcggcgagaagaacgtgctcatctttgacctgggcggtggcactttcgacgtgtccatcctgaccatcgaggatggcatcttcgaggtgaagtccacggccggcgatacccacctgggcggtgaggacttcgacaaccgcatggtgagccacctggcggaggagttcaagcgcaagcacaagaaggacattgggcccaacaagcgcgccgtgaggcggctgcgcaccgcttgcgagcgcgccaagcgcaccctgagctcgtccacgcaggcgagcatcgagatcgactcgctctacgagggcgtggacttctatacgtccatcacgcgcgcccgcttcgaggagctcaatgccgacctctttcgcgggaccctggagccggtggagaaggcgctgcgcgacgccaagctggacaagggccagatccaggagatcgtgctggtgggcggctccactcgtatccccaagatccagaagctgctgcaggatttcttcaacggcaaggagctgaacaagagcatcaaccccgacgaggcggtggcctatggcgccgcggtgcaggcggccatcctcatcggcgacaaatcagagaatgtgcaggacctgctgctactcgacgtgaccccgttgtcgctgggcatcgagacagctggcggtgtcatgaccccactcatcaagaggaacaccacgatccccaccaagcagacgcagaccttcaccacctactcggacaaccagagcagcgtactggtgcaggtatacgagggcgaacgggccatgaccaaggacaataacctgctgggcaagttcgacctgaccgggattccccctgcgcctcgcggggtcccccaaatcgaggttaccttcgacattgacgccaatggcatccttaacgttaccgccgccgacaagagcaccggtaaggaaaacaaaatcaccatcaccaatgacaaaggtcgtctgagcaaggacgacattgaccggatggtgcaggaggcggagcggtacaaatcggaagatgaggcgaatcgcgaccgagtcgcggccaaaaacgccctggagtcctatacctacaacatcaagcagacggtggaagacgagaaactgaggggcaagattagcgagcaggacaaaaacaagatcctcgacaagtgtcaggaggtgatcaactggctcgaccgaaaccagatggcagagaaagatgagtatgaacacaagcagaaagagctcgaaagagtttgcaaccccatcatcagcaaactttaccaaggtggtcctggcggcggcagcggcggcggcggttcaggagcctccgggggacccaccatcgaagaagtggactaagcttgcactcaagtcagcgtaaacctctttgcctttctctctctctcttttttttttgtttgtttctttgaaatgtccttgtgccaagtacgagatctattgttggaagtctttggtatatgcaaatgaaaggagaggtgcaacaacttagtttaattataaaagttccaaagtttgttttttaaaaacattattcgaggtttctctttaatgcattttgcgtgtttgctgacttgagcatttttgattagttcgtgcatggagatttgtttgagatgagaaaccttaagtttgcacacctgttctgtagaagcttggaaacagtaaaatatataggagcttaaattgtttatttttatgtactactttaaaactaaactgaacattgcagtaatgttaaggacaggtatactttttgcaaacaaatgcataaatgcaaatgtaaagtaaa

SEQ ID NO: 6 - DNA, 1387 bp, Homo sapiens
gtgccacctgcccgcccgcccgctcgctcgctcgcccgccgcgccgcgctgccgaccgccagcatgctgccgagagtgggctgccccgcgctgccgctgccgccgccgccgctgctgccgctgctgccgctgctgctgctgctactgggcgcgagtggcggcggcggcggggcgcgcgcggaggtgctgttccgctgcccgccctgcacacccgagcgcctggccgcctgcgggcccccgccggttgcgccgcccgccgcggtggccgcagtggccggaggcgcccgcatgccatgcgcggagctcgtccgggagccgggctgcggctgctgctcggtgtgcgcccggctggagggcgaggcgtgcggcgtctacaccccgcgctgcggccaggggctgcgctgctatccccacccgggctccgagctgcccctgcaggcgctggtcatgggcgagggcacttgtgagaagcgccgggacgccgagtatggcgccagcccggagcaggttgcagacaatggcgatgaccactcagaaggaggcctggtggagaaccacgtggacagcaccatgaacatgttgggcgggggaggcagtgctggccggaagcccctcaagtcgggtatgaaggagctggccgtgttccgggagaaggtcactgagcagcaccggcagatgggcaagggtggcaagcatcaccttggcctggaggagcccaagaagctgcgaccaccccctgccaggactccctgccaacaggaactggaccaggtcctggagcggatctccaccatgcgccttccggatgagcggggccctctggagcacctctactccctgcacatccccaactgtgacaagcatggcctgtacaacctcaaacagtgcaagatgtctctgaacgggcagcgtggggagtgctggtgtgtgaaccccaacaccgggaagctgatccagggagcccccaccatccggggggaccccgagtgtcatctcttctacaatgagcagcaggaggctcgcggggtgcacacccagcggatgcagtagaccgcagccagccggtgcctggcgcccctgccccccgcccctctccaaacaccggcagaaaacggagagtgcttgggtggtgggtgctggaggattttccagttctgacacacgtatttatatatggaaagagaccagcaccgagctcggcacctccccggcctctctcttcccagctgcagatgccacacctgctccttcttgctttccccgggggaggaagggggttgtggtcggggagctggggtacaggtttggggagggggaagagaaatttttatttttgaacccctgtgtcccttttgcataagattaaaggaaggaaaagtaaagtgtg

SEQ ID NO: 7 - DNA, 40046 bp, Homo sapiens
atattatattatactatattatattataatatactatattatattatattatattatgttatataataatatattatattgtattatattatgttatataataatatattacattatattatgttatataataatatattatattatattatttttgttatataatatattatattatattatattatgttatataataatatattatattacattacataataatatattatattacattacataataatatattatattatatattagaatataatacataatgaaataaggaatataatagaatattatttcatagaatagaatagaatattatttccttctataatagaatagaatatttcattatttcatcccatattcattatttcattctataatattatagaatagaatagaatattatataatgtaatagaatattatttcattatatattagaatataatatataatgaaataaggaatataatagaatataatagaagtaaagtaattattataagtaaacacagtagaaataaagttcacaataaatgtcatgtgtttgaatcatctcgaaaccatcctcccccaccacctccctggtccatggaaaaaatgtctcccatgaaactggtccctggtgccaaaaaggttggggactgctgttctagggccactgagtgattcacaggacaggagacatttgtgaggggctccttggggacccctacttccctgccctgtaacatccagcctcatgtgcgcacgtgttcaacttcatgcctttgacttagacacatcgacatgagcataccggccttctggttccaagccagggttccataaacaaatccttcttagttagccttggtagctcaacacctttggtatctcactcacttaactgccacgcctactcttgttggatccggttataaagtaaactatgttctttgagaactgttgcatacagatgagttggcagccggtctgagctggcccacagactcataaaatcaacagggcctcgggtaccctcacccagcatatccaaactcttgcatcaaaggtgcagggacttgctcacatcgagaatctggttgctttcttggagaccaagaaaatgagtttttgtttctacatttactccagcaatccatgaggtaagaggagaaacacctcattgtctctttgtaggaaaaagaagttaattcttgtgaaaatttagacctcttttccccgcctcaaatctaggcagacttgtctgtccactcctgggggatagatagaagcatggttttaactcactcactggatgcttttggtgtgctggttacatgtggattattagctgtgtgctgcatcttgccttccctgggtcactccgcagccctggggctggagggcagtaagaatctttggttgcatcatgcctgattccaaagtcttcttttggtggcagagatgtatgtagggttttcatctctggtggcatcctttcaattgtagcaagaccttgcctagtaacacaacctctgccaagccgtttccatctttaaggtagaggatcaaggtgctagtggggtctattatggaaaacatatatcaggaaaaggcaagagttagccaggcattttgattaccttcacccaaatgtctttctttcattttctgatgtaggactttataggaattttgcaccattctgaatggatacatttggatttctcaacatttgttcagcttcctaatgactgttgtgacaattgctctataccagtgaatgccaactgtttatctctgctctgaacaggtatggagccccttctcccaatatctgtatcttacagatttggtgcatagacgcttaaaaggagttggtctttcgcaaccagcaatctttaggaaaaatgattgaatttttctccttttagctgggcttacaaaatggagcaaaacatagtgattgtgctatggaccttttatggacagggacttggcagagccactcactggatgcttttgatctgctggttgtacctggattattagttgcgagctgcacgctgccttccctgggccattccgtagccctggggctggagggcagttagaatctttggttgaatcttcggttacattggaggagctgcccagtctttgtgggctcccttcagtcatgggcttggcttgtgttgtcttactctacactgtttagtgtaaatggattctcactaagtcagcttcagcttttaagagcatgatggggtggagatatctgggaacgtatgggccatcagaaaagcatttttttatactcaagtcatgaaggtggatttgttctgtgtaaggaggtgcaccaagtcagtgtaggtgcaagactgcccttgtaaagaagcagagtatgtgaattccttgtgagtgggcttaatctttaatgctttaatgacttttggtttgcctgattttttttaatataagaagtttgtaattgccaagcatgcttttctgtgaagagctaagtctcaaaattccccattcacgttcttttcctttcctcagtaatgtgtttttctttcctaggttatgaatctaccctgcaccttgtcacagctcagtaattgtccaggaattcacctgtaactcacatgctttgcctttgacttgctccagggtttccatgcattgaaggcttcctggtgccctctcagtggaattgcttctggcctggcagtttgatcctgagggtgacccaaatgtttctccccttggctccataatttaagatgccagtgatgactattgtgtttgttctcttcattcttgtctttctcatgactattattattatacatacaggtttttttcttcatttgcctttcaacaagcttgtacttagaactcattgtgttttggatgctaggtcctgggaaaccactgaatggcttgggaaatgctttgctctagagggctggtacttgggctaggggctatgtgcatggaaacaggctctcacacgctaatgggagagatacctgatgagtggggactgtgacacagaaatgtagctcatagtatcatcgctgcctgcacagaaaagtacatcatacttttcctacagaggacctcatggaagcatgaaccaaatgcgctgggtgggcaggaaggggcctactggaggcagggggaagaacattctagaacaaggaaatggcatttacaaaaatatgcaagaacgagagagagcatgacttacacagggaataccaggctggtgtggctgagggtgggtggccaggggaggggcgagggaaggctgcagggtgccacgatgaaggacctagtatgtgatgctgaggaacttgggcagtgtccggaaggtggtgagaaccggggtaagatcttatttacattgtggaagagttgctctgctgcacagtgcaaggtggactagagtagggtaagaccacggccgggtaatcagggaggagattaccaagagggagaagacacaaagtctggtggccaatagctgcagagagtgatggggacaggcgaggatgaagtggagctctgaaacaggagccagagactcccaaagtccgcaaaaagagcacactttgaatggcacagacccttttccttccactcaccctcccacattcaagactgtgatgacctaggctcaagccaaaagtatacagaaaagggcctaggctttcccaatctgctctttctcctgaaatatatatggttcaggaatagtattagtactgctgtgaaatagcaaaaagtggttggctcgattatgtggttcagaaatcatcatgaacaagcagggtgtgcagaaattggaaaaagaaaacaacaaaaacaaacatcttcaaaaaatgctgaagaaaaaaattagtgtagagacatataaaagatagacccctagaaaagtcaacaataggcctggtgcagtggcttacacctgtaatcccagcacttttggtggctgaggctcatctgaggtcaagatttcaagaccagcctggccaacatggaaaaacctcatctgtctaaaaatttgaaaattagccaggcatggtggcacacacctgtagtcccagcttctcagggggctgaggcatgagaattgcttgaacccgggaggcggaggttgcagtgagctgagatcgtgccactgcactcctcaagcctgggtgatagggtgagactttggctcaaaaaaaaaaaaaaaaaaaaaaaaaaaagagagaaaaagaaaaaagaaaaagaaaagtcagtaataaaccttaaggtcaaaccttaagttaccttaaggtcaaaggttgttccttcctccacgcaggacgattctaagccatccttgcagaagattgtgaaggatgtgcaaagtgtcagcctttcttgccattgcctcgtcagaatctgtgagcaaacggaaaaaagaacgatgctcttacacatgaaactcctggattctttttagaaaaatagcagaaagaaaccaaaaatagtgcagagaacaggtcgcttcaaaactattgaggatccaaagatgttctgccctaaggagttgcttctcaaaaactgttattaaggtccttagctgtcaaatataaaacccaacccaaaagcattccatttaaaaccagagcattgaaacactaattttgaacaatcattgtaaagcctcatcaaatccagctcactcattgcagaaatatgcaactcaaaggccctaggaaaaatgtaaatctgaattttcccagcactgttttggatgaataatttcctctctcagaagaagcctgttgttacttttcaaaattggttccccagtatgcaacagagtccatctctgcatgtgtgtatctgccctgtgctgtgttctgccattaccatgctttgtaaactttgcattctggttagatgcgtgtgactcactgatgcttctaagggaagattctttttgaataatccttgaaatacaagccagatttttccatttatttagaatttcccaatgtccctgcccctccctctgctccagttgcacacacaccagtgtttcttggctgggattcaggaattgtatttattggggtctatcagtgtgtcaccatatccccagggaacagatttaaatatgcaacccaacacaattgaaagcaacaggttaatactgtctttgcagagttaaaacagcccaagttctctcaggtgactacccgtaggggaagtctcatggttcgttgcccttgattaaattctcaggagctttctggctttatccagatctaccatttgtccttgaagagctcagcagaactcagcaactgtgaataactgttgtgggtcttttcacaggagaagactctgtgaagtgtgtggccccttggagtccgagtccagtgatgagatattcagagagataagggtaatcccggtctcatgctggaaagtgcatgtgaccattttggggatcagggtatttggatgctgttaagggaagtgttggactgctgatgaattatgcacagagtatggggagcttgaatcgggttcagagataagccacaggcatgggctaaggtcaccttagacctctgggaagcccccgctgtgctggccttagtgaagtgtgatgacacagtccctatgctgcagaagctctggtccccgtgaggggatgagtagggatggcaggtacaagagtggctgcatgacacatcagcgaactggcagagcatgagcacgttctaacctaccaaccaggctccccgacccagtctgcttctagggcagccccgggggggatggagggggcggtaggacacagggctgtttcctctcccaatactccatcccctcagagggagtggagaaggggagtcaggagacccccagagcgctccccaggaccaggtctgagagtcctttccaacatgggtctcctcactcctagtcctgcttgaatccattgtgcataagaatttcacacccagcctgggcaatgctcaccactgaagacacaggatgaggtctgctgggcacggaggctgccagagagtggagaaaaccccgtgccgcactcggattttcttccccttattactgatacacctgctcctttggctgggtgtttcccagcctgtggagtttacagatttggatttctacaaagttgccccttaagtatcttgtggcagtggggaaaggggtggagagactgggaggatggcactgcagcaagatgagcggtgcgacccaggcacccagcgcacagcaggcaaatcccttcccacgcggatgaccacggccactgggacctgaagctgggaataggcagccaccggagaagcgcggccgagagctgggggctgaaactgctttctcatctatgaaggggctggttttctcatcctcactgaagggccagaggaaattagacttcaacctcacccgttaggatgtgggttggagatcaggaagaagcttgggttttaggggtgtggagaggcaggagtccatttcagcgggaaatggacacaaacttctacagacacggagcctgcatctatctttctgggaggggttccggtggccgcttaccgacaggcagggcacggggctggtgtttttggaaatcttatcacaaggccctcactcctgggcttgcaccagggaggcgagccccagttatcccgctctgcagtggctcccaggagcaggggtatgtttctgacgacagtcacctctggctattgctctgattctgcctttcttcaggttgcctgggtctatcccataaatgagcctgtgatcactgggtacaagctcccttgcagcttcctttctgtctgaggtcccagggatacccgctagccctgctgctcacatcttgcctcctcactcggcatgtttctctttctgttctaaatgtcccagctcatgcccctccatggtaccatccccattgaccccagccccactagggcccccaatcctgggtctcagctgccagtgaatgctgcagccctgcaacagttgctcagtcagcaccccacgcagaaaagcgcctcgggcggaagctggcggcaccagagtttctgtctttgcctgcgtagccatgtgggttagggagccccagggacgccaacagccagaccacaggcgggctaatttccaaatgctgacacagtgaatgccacccatatttcaccagtgactggagagcagatgctgggcattcgtgggccctgcttgtgcctggggatggagagaaggcaggacacttgaggcagatgccagtgctgcctctgagctgttgatgctccctgccctggagttcacaaaaataatcctctacatggtgcatagagtgtttttgtgttttttgaagtattacaggcaggccccggcgacatgatcttcgtctcccagatagggaaattctaaaaatcaggaaaaggggctgggcgtgcccctgtcacatagctggtaattggagctgggtctctggccttcagggcactttcctctgtggtcacacctgggtttcagagccacctggcctccacttttctgagcagcttccttcagcattttcttgtttcctctgtgcttgcatcccgcctgccccttggggtcaccctgtttccaggctattgcgtctccaggccccttggtccagctgatgtgggttacaaggaccacccgtgaggtggcagtgggctaattttcaataatccagttggtgactgttcttcagagagaatcttctggaatctctgacttagtgacggcacagagacttcctgagttccttaagtcacgtcttccttcccttaagtcacttcttaaaaaaatcaattcatttctacaagaactcatgtatgcatttcacacagtgaaacctgtgcagtgtcacgcacttatatcagacggtcattgcctctcttttacattgtcagtatggaattcttcacgggaaacctgccacagtgtcctgccggcctgtctagtcaacagttcttcatgtctcactgaagtccctcttgccataaatcaagtcatgtttctatagtgtcgctcatccatccggattctcccaagcactgcatcatttgggctgaacgatggccctgggaagtagatagcatcattgtcatctgacagaatgagaaatccgaggcctggctcctgcccggtctggggccagacaggtgtccttccgggcgcccttctgaaatcaatgccgacctctcttgcgcagtgccctcggcaggcgccagggggcgtgctgctgctggtaagcgggaggcccggcggaggcgagtgtgggccttgccgcgcctcctctcaccgcctgcgctttgctgcccgccgtctgcagcaccagtgcctacttacgggtacttttcaaggtcacttctagttactgtttctttctaagtccttatcacaatctataattactctgtttatttggctccttttaatttcctgcccagctcccccacttccctgggtcttgagaaggccgtaccccagtgcccagcacaggcggctcccactacagatgccctgagagacgcagacgggagggctagccaggagagggcacgcagggaagggaggtgaggagggagggccagcctttcccccagaccttccttccttttccctcctgccttagacataggaattcactcatcttctgggccagatctttagggaacttggcgtggagacatcaggttaagatctgggttctgtccgggagcggtggctcggggctgtaatcccagcactttgggaggctgaggcaggagaattgctggaggccaggagttcaaggccagcctgggtaacctagtgagacctcatctctacaatcaatacactagcccggagtggggcacttgcctgtggtcccagctacttgggaggctgaggcgggaggatcccatgagatgggaggtagaggctgcagtgagctatgattgtgccactgcactccagcctgggcaacagagcaagaccctgtctcaaaaagagctgcgttcctaccccagttctgcctcatatgagtttttaaaattctctaaacctcagttcccttccttgtcaaacagagaaaattagacctacttcatggggtcgctgtgagattgaatgaaataatttctgccaagcccctaccacagttgctggtatgtgacagagattcaacaagtgtctgttccttttcccctgtgggaattccatgcctagaagggactaaccatttaaccccaatcctgtagagtgaaatcaaccccttatgtgccttcaatcacataagaggggtgacctgcctggtggcatgggggtctggtagcaaatacactaccacctttcaggtctgtgccaaagtcacatgggaaaggatgagttttaatgagtttcttccaataattaaacccaaggtagacatatagctaccaactgagtcctatagtagactaaattctaaccttctagctctgtgaacttggctcaatcacttagcctctctggtgtttgatctcctcctttagacactgggaatagtaatgctgtctacgtcacagagtgacatagacgctccgtaaactactgagtttacccctggagaccgcctggaacacagtgagatctgttaatgtcagtgatttctggtccatggatgagaaggaaaattaccccaactgaactagtttcaagaaaactttatggaacatttattattggccagtctcttttatacatcttgtcttccctcaccttcaaataactctgaaaagtatgtgcccttcccatttttcattcattcctccattcactccttcaacaaaccctagctgttgccacggagacacgtgccatttgaacagttgttaatcgtcaatcaaatatggtggtgcagagttgacatttaactgttcttgcctgtttttcatggtagggctcactgctgtgttgcgaacctccttaaggagtggatgtttttctctgggcacttctgcttggtctgtagcatgcatttccttgtctcttcattcttagctgctcttacttgccagtgttctttgcctccgcatcccttctcatccctccccatccctcgccatccctcgccatccctccccaaccctcgccttccctcaccatccctccccatcctgccccatccctccccatctctcgccatcgtggagcttctcgcattccctttgcccactctattttatctacattttcttcagtttctccaagctcttgcacagggtttagctgctcttgcactttttaaaacttttaaaccctttattaagccaataaatgctaaaattaggtagtttttaaaaatgtaaataaatacccagaaacacatttttatgtatgttttcaggcacaatattgagttcaaaatacatgagatctatgtgctattactcactgtagaaaatctaagcttaacttaaaaagacaagatggggacaatgctcccaggtgcatcctgagccattgcacaggcactcgtccttgccacctgtcagcattggcacttatgaatccaccatgtgcagtgtccacaccatccctggatgtttgcttggtcattagttcagtgagcaagtgaaaaactagctcagctacaacttagagaaaaaaatagcttctctctcccctggccttctctatttggagagagccctgaggcccagtgagcagtgttgggtataacatagggatgcagctgacaggtccctgcacttgtggcactcccagcccaggggagggcactgaccttggtcaagaaagatttttagagtctctactgtgggtccacatgctgggtattcagaggaaggcaagacgggctgctgtcctggagggtgtgttctgtagaggggagatcgacaataagtgaatgcatcaccagcagggaaataaacaaccaacctgacagccactcttgataagagatggaaagaagccaagacaggatggagttcccactggagcagtgggtgctaccttagattggatgctaaaaggctctcgaagaaggtggtgatggagctaggtccctagcgacatggagcagccagacatgggaaggcctagagcggagcagccctgaaggaggaagcagcaggtgccgaagcccagggcaggagctgcgccgcacattgcagagcagagggggtgggaacatagtgagctaggtgacagaggggatgactttgggctgtggagtgtggcagagtcctggctatatggggccttgaggtcatcagaacagggggaagctgagaaaggtctcagcaaggcagcagcatgatccgattttcaggactccttcctcactctgacggtgtggactctattatgaggagaaagaggcggtggacagatcaaggagcaggcgagttttgtagcccaaccaaggaattatggtggcctggcaagcagaggagatgaagagaagaggacagacaggtcctgactatattgtgtagaaagagcagacaagatttgctgatggattgcgtgtgaggtgagaggaagaaaagaattaagggtgaatcaaggttttgcttgactcgggggtgggtgtgccattgacagggctgaggatgatctgaattgaacaaaaccaacatgaaatcagttgtattcagtgctaagaaggaaaagaagatggtgctaggacatttttttagagtaggaatttcagtccaagatgcctatgcccagatgtgctgtcccagcgtacatcacatgtggagctgcccctcccctgctccctcttctgcggtcctctctctgccctgcactctgaggtgcacatgcacctctcaccccagcctggtggccatggtacctgcaaccctggccaagagcttccagagaaaggattcacgccatggcatccatcaccaagccctgtgccctggttgcctccgggtctggaaggctggtcgtgctaacctcagaggaaattcagttggtctggcacaattgcatccttctcgtctaacctaatctcatcattccatgggcaatctttttctctctgatccacagcctttcaccacttcattaatttgtccctagcagccggataaacagtcttctccctctgggcctcatgtacacaaagatgcttctgacaggccccttgaaagcagctcagagcctgctgtcttttcccgcccggaagttctggtgggagaaccttctttaagaggctccaggaggggatgaggggagggagaaagaagacttcccaagacctggcaagagccccgagcaggactatgcatccttcctgcatttcctctgcagctcacacaggcacagtggtaccgtccttgggtctggcaggtgagagctgcctgcccaaatccagacctgggagttaaaactgatttccccaagtgccaactcagcctttggctgtcccagtcctgatctcttcatcagagcccctcagccctgctaaacaaggaaggagcctggcatttattgtggctttccccataccagatcctctactgggccttcccacacttaatcctatctcagcattgggaaacagatttccttatttccatgttcatggaggagaacgttcaggtttagagaagccaaataactcactctgataacaagtggaagaggtgacgtttaagcccagctctacaccgccttatagcctatcccctcactattttcaaggcacctgtggagccccatctttgctttgccaacctcatttgctgcctctttgcaataatgtcttcaatcttaatgctgatcacagcttggacctcacaccctctgggtgccagggagccagcattttggttagtactaagcccagttgtcaatctcatcacaattcctagagggcttccttctatcctcttttctccatctgctccagtgaagctcaggggaccttggcaaggtgggaaaggtcaggactcaaatgatgttggggaaaaagaataaacccatcactgaaaatgggtacaattattggaaatgtgggagggtaagaaaagtgaatcaggaagacagtatgtccaaaacaacaaaaaagaaaagaaaaggaaagaaaaaccgtaaacagctcacaatgagctccagggtttttactgctccttacgtttcttagcaactattttttgtttgttttccaggcttaatcgattacattgagaaattagctctgtaaaatccccaggtgagctgctgggtcatgcaccagtaagctgcagagctggaattcaagcctgactccagatacgtgtttcaaggccagagactcagtggggagcctgcacgtgcgctccagctagaccaccttgtttcttttcataggagttagtactcatagcacaccaggggcttcagtttctttccccaaacccatcgtgcatctatgatacttaagaagatctaggtttggccctgcaggtgtgtcatcaaacagatcattacgatttgtgctaatccagattaggatgttgagaggtggtggttggggacattctttgtagctcttgatagtggcccttattcaggaagtacgcaaggaacatccagccctgcctttgagaaagggcccagcctctggacatgcacagtgggaggtttctgtcattctcccgtgagtccttgaatgtagactcaacacaactctgtgccctgttgtcacccaagaaagcagcaaggtccccatcccagtcacgttccatccttctctctccttggtgtatgtggtgtggggtggggagcagaggtaagtagtggcacgggggaaatatggggcaaggcggggttttgaatgggcccgtgggcctctggcttgtctgcgaggtcatgctgagtctctggaggggctggctcaaatgggaattggaacatccgcgctgctgactccaggaatacaacaagggctatgggcaaggaataaaatgctcaaaaacattcaaacaaaagatgtgctgaaagaaggagaaagagggagaaaagaaaccgagctcccaggagagccgagagaaggagctcttgcttggctggtgcagtaggagggaccctgtgagtttcctcccatcccacagacctgccctctggcactgggaggtgtgagggacttcaccctggagctgccaacccaggatcgtaaccaaacaccgttctcagacctgcagagcccaggtgcaggtggatgggtgggtgggtgggtatgagggcccacggcccagcctggactgcttcacccaaacacacctgggcagcagcagggaagagcttctcctgcagaccctgggagaagagacatctcccacactagcagaggttctgtttagcagtgagggtgagcagaataatactttccgtactccaagctcttgtggcagagaaaatcattctgatggtggtgccttcaggagcacagtaaccacttgctagagaaggcaggtgctgagttcagccgaggttccaacaagggcccaaaggcatggggaagtgggttgagagttgaggggaagtcggtcgcgactgtactgtgtgacaggcactttacatgtgtgttttttctatcccagctttattgcaatataattctcataaaataaaacccactaatttgaagtgtgtaagaggtggttttcagtgtattcacagagttgcacagccatcattacaatcaataccggaacattttcatcacccccaaaagaacctggtgcccattagcagtcactccccatccgcctcttccccagcccctggcagccaccagtctaactctctttctctgtagatttgcctattctaacatctcatctacatggaatcacacaatctctggcctctttcactggccaaatgttttggaggtccatccatgttgtagtatctaccagtactttattcctttttagagctgaataatattccactgtatggatatgtcacattttatttattgattcatcagctgatggacatcaactgtttcaaaagcttccactctttggctattatgaataatcctgctattcacatactcattttacgtggatatgtgtatttctcactgaatcctcataacaacaaaggcactagaatcatcaatatagtatggaaaagtgcagctcagagaggttaaggaacgtctttgagactgaaacgcttcttttgatttggcttgattttgatagaatggcaaataagtggaaataaagtggaatttaattttaccttttccaggtcattatacacaccactgagtgaaaagaaacaaggaaaggaatgagagaaagtgcgtcagcaggccttttgtaggtaccaccggcctctgcctgagaggtcggtctcagtgagggccctgagcttgcctgccttgcatggctctaaggtctagggggatccccccttcctgcttgtcttccttgttttagaggcagacacgaggattggtcaagagcagttcaagacatttgctggaggacgcagctgggaagtctcccgggcagtgtcctgttctgagagggctcctgggtgggctgtgcccggtaatgaggatgggggcatgctaaatgccagcaagaagagccccagtgagaagactccagcatttgctgaagggcagctctatggcatggaacaaagggtcaccgaagctgctggctctgctccctctggctccagggctttcccagaaagcacttgaacatgggagggtgggtgatatgacgtgccgctccattaatgtaactctgatggcttggcagaacccaagccgaaactggtaatcattgaccctttgagggtcaatgatacccgtgggcatagcaacggagtcaacagaaatgctggctcttccactaatcccctagagcctggctcttctcacctcctttctgagaagcaggatgctattgcagcctgcacagtagcaagagcagcccaggattaaaggcctcacagatagggacaagattgcctcctttcattcaatgcatggcaggagcttgaaggagaaactggagttgcacgtagtatgactcaaggtattaacagcttgatcacgttctatgtccaagtgtggtctaagctctttccatccatctgtaagatagatataaaagcccccatttttcagatgaggaaattgacacactgaatacccaatgttagagctagtaagtgactgatttcagattcaaacactggaaacccacttcttaaatcttaccccataggccacttgttgggactgggacagagaaactcaaacacgctaaggtgtgggcctagaaggcatccaaatccctctccaaacccaagcacgtggtgctctgtgccttagatcttgtgtgtctgtggaagctgggctacaccagccttctttgcctcatgcaacataatgaatactagtctccgagtgtccatactgaagacattagttgaattttttccattttataaattgtcaaggttgggcatcctatatgttttctttaaaacaaagtgtacattcttgttgcagacgctcggtaaagcatgttcaggcctcccgtccacatggaatccattcctttctggtctggaaagactgagttgatttaataccaacccaaaccacacagaactagaagggtcagactaataacagatctctgcacacataatagctacaactttttaataaacactggaattccttcattaaactccagtgccatttgaggtgggtggctgaatatgagacttaagaacagtttcattacagatttatccggtttttagaacaaccatctcctcctcaacacacacacaggataaacaagtggaagaatgattatttgatttgcaaaaattattcttcactttataaaataatccactataggattcctataaatatctaatatcctaatgcatatgtaatatgattcaccatacacaatttctgtctacatacatcttttgagagtatacagtgatttcaatatggaattatatatctagatgtgtacaatgatattttcaaggcagtggtgttctttttaatagtaataagaataaacagaccatgagaacaggaaagactgtggatcattgtgttaatttacttttcaatcctaaattcactagaaactagaatgggctagttagggagatgtggcctcagtgtgtggtagaggtttgagaacttgggttaaagttgagtccactggagcccaagctgacctttctacctttgctgatgtggagggtcctgtgtgttcctggtccaaactaactgaagtttcaccctggcttctgtgtgggcctgtcctctgtctccagacagtagccatatgtgttgtattttaccaggtttcttctctactggccttcatccccatcctgggccctgacaaagacagtgtgacaagttctgagccccacaggtggaatcccaaaccaagcagctcttgctggtcaccccaagatctacttatacatgaagttttgaaaatcatctcctgaacctcttctgacagaggtgagtggcttgattttcaataagcaactattggacaccccaggctacaagaaagctaggtaagcatttggttatgcagagcctcttaagcaaaggctgtgggacctagtcatttgcccttgcaggttctgcaagtactgagtcccaccaccagcatcagagagtggtgttaggctggcattgctctctccacagcccctttcaaaaatcaagcactttgagtcatttacaccttcctatatctgtttatttccttgacagatacctgttgagcctctgttctctgcctggtgctggggtaggcagggactggggacatggcagtggaggagacagcacaaaagtaaatgtatcagttaaaattactgttcataccacaaatgaaaggaaagcatacagtcaaattttgcaaggagaggaaacttgatttaaatggggagggggatcttcttccttctttgagaaactgacatttaaatgtctttctgagaaatgacatttaacttgaggtcaagaagttggcaagggggtgggtgtggcgtgggggagagtagagctccaagggtttccagccgaggaaatagcaggtgatgtaggcccagagaggttaaacgacctgctccagcctctatggttggaggcgggggggccctccgatgtgtccttttttgcctttgtattcccagtctgcttcctggacatgacctcagtactgactccaaggtcaagagctttgccctctgctagagcagtgagtgtatggggctggctcatcgtcactggcaggtttgccttatccaccaggtggtgggttggcgggcgggcaggaggggttggaggtgttgcctcctcttcccacaggagccattgtcatcacaccaaacttctgcctatagaagaagtaacaacaccctgtagaggcctacagatgtccctaagtgtaaaatgtcactcccacaacctcaggccgtttgcttatgccaggacaatccacagaagcttccaaaaaaaagtatgatgctggacagtgtatcttcagctgctctcatggctgcttcttaattctgttgatatcataaccatttctaaactctgcctggctctgccaggcccctctcatgacatcagggcctatggtcttctcctccaacacacaccctcagatccaacccagggtacctgctgccctctccatcgagctctctccttcctcctcttgtagtgcttttgtagatgctgcaaaaccccagaaaactgtcccctcctgatccttttatgctcactatctaaaaaggtttggacccttgctagctctcaccctctcatgtgatcactcacacaaagcaaggaaatgtatagaaaaccattcctggcgcagagtaagttgatgctgaataaatatttactttccctctacattgtttaccaactgtgttacatatgctttagggcttaaaagcaaagacttgtcagttgggaagatctagattcttctaatctttgctctttgggctttctgctttgtgaccttggataagttgcttaacttctctgagcctcagttcccagcctcctagagttaccatgagtttaaatccaacaacacctttaagagattttgtatccgtgcctcggatgacactacaggcctttgggggcccagaatgccactactccagaggggcaccgctggcatcgtgctccagggggcgctgttcactgagactgccgcagcgtgtgtctccagcaacgggcagcagactacagaagcccattctggccgccttaatggccattccacactctctggagactgttatcagccccagcctttttcttcattcatctgtgccttgcacttccatttttaccttggtttaccttctcaaccctggctcaatccacttatatccaataaagcaacactttcccttaaagtgcagtactctgaattttagaagagaaaaattcttagaaaatctctagtatagccaagtagctcccattgtgtggcagtgagtttctcctgtcccctagggtgctccagctccttgtcactgttcctcacagcccctgaggatgtgctgctctctctttaaaactctgaacagggcagggatcaagtgcttcttttggtctttcttcatacagctgagacatgctagcatttctgaaatatcttaagaaactattatgaagaacaacaggaaacaatattggaaatacagaggccaggcatggtggctcacacccgtaatctcagcactttgggaggctgagggaggaggattgcttgaggccaggagttcaagaccagcctgggaaacatagtaagactccatctctgcaaaaacaataataacaacaaaatcagctgggcatggtggtgcacacccgtggtctcaggtactttttttttttttttttttttttgagacggagtcttgctctgtcacccaggctggagtgcagtggtgcgatcttggctcactgcaagctccgcctcccgggttcacaccattctcctgcctcagcctcctgagtagctggaactacaggcgcccgccaccacgcccggctaattttttgtatttttagtagagacggagtttcaccatgttagccaggatggtctcgatctcctgacctcgtgatccacccacctcggcctcccaaagtgctgggattacaggcgtgagccactgggcccagctggtctcaggtactttgaggctgaggcaggaggatcgcttgagcccaggaggtcgaggatgcagtgagccgtgattgcaccactgcactccaatctggatgacagagtgagaccctgtctcaaaaataaataaacaaataagaaacaaaagtaaagaaatgaaaaagtaaaatacatacaggataagcattcaccttccaaagcattgatttctgactacagcaaatgtgggctgccaccaaagactggtaagacctcacaaacaccctgcccgggttcaggcttcactagctcccagtggtggggacatcacagcttccagcgcttcccactgggacccaatcaaggtgccaagcagaggtataggttttgtggtcagagtatagttatcttaggataaccaatggctttgggaaacaagttagctagatagaattcaaaagccgaacttgaaatttttaactcattttaatggctttttctatttaacttggctatatccttgattcttcacttcttcatacagaaacaaacatatgtaccaattgcacataggcatgtaagacttgtggaagccacggaatggaattggttctcaccagtgggcttgtaaagtggttttgttgtgttatagttacacttatttcctgtgctcttagggtcttcagtggtcagtgccctccagtcagaaagcaccagtagtaccctgtatttgagcaagttggactttttgcagctatggagaactgcaccataaacaatcatggggcgtctcactgagagggttttggaaaggacttgcataggatctgggcatgtttcaggtgatgcggcgggggaggcttaaggaagcaatgctttgctctggattaggggctgttagggagtagtgatgattctatgatcaaatatgttgataattcttattatctaggtgagaagactgacatgagactaaagctgttctggggaaagaaacagcagacactcatcaggatggggggatattcggccattttgtggcttggacaatgtttgtgttttgttggtgttcagacatgattacagagtggccttgttttatcccaatccatcatgatctgagtggcctggtctgaggctgatgatttgtgagattgcttgtgtttaacaggagcaagacccagcctcatgtgccaggagaaccaagacctcgccggtagtacgaggtcaccttccagtggcctgcttttccacagatccaatcctagttaatcctaatcctagggtgagagaagaacagcatcaagcctcggtaccgtcgctcagttcagccttgccaaggataattctctccctctatcctgttcccacctctccaagacaagtcttttgccctgattatagagaaaacctttataaaacatgtttgtattttccagatcttctgttgcgcactgggaggatgggctctgaagctagcatagttgatagaccagatatgttgtcagaaccttcatcactctcacggaagccttttcctccattggctgtagtctccaatatggcccatttcgctccaggaggtagaccccgattggcctggaccagtgacccctgattaaactgccatgctagtttgaaatttgggaaccagttataataattgtagctatttattgcataattactattttctaggaactttacctatgctattgcatttaaatcatacaacaatgtttgagagtatattatagccatttcacaggtgaggaaactcacctgtatcagcaaaggtcagtggtttgcttagctcacctgactcttgggtggcagagatagggttcaaatcaatgtctgtgctaacccgagctagaagcccgtcgactctgccatgctgcccctagctgttacctctctgggaacattactggccaggatctcctatcttctcctgatcccctgtgcacaaaaggacaagttattcagaaagtgatactctggatggctggcccagagacgcctacagaacacagtgtgcctcctgagagtaccaacaccatcagaccttgtgatgcttcagccctttttccccaagctctcttctctggaaggagggaggcacctaggaaggcccttgctgtacacacaccctggatacagacacactctggttcatagcagtggggacccaggagtatgctcaccctacaaaaaagtagggtattcctgaagtgcattcccaagtctagcctggaagagtcctgaagctcagatgccctcttctatgcccatgaggccaggaaagatggtttctaccagccttgccaagttctatctaaaaagagcccatgctgttcccatgtgagctgcctgatagtggtaaagacatcagagataacttctctggcattaccgaacagaagggaaatgccactctctgtctactacaggttctggatgtgataagtgtagtctgtggagctagatggtttactgcttctcggggctctgaacctttgcagatccagcagggtggtgatcctccaatagcttgagatgattttcatagaaaacaggaagtcctccacagcagcagttagatgcacttgttttccttccttagcaaagctgagtaagaatacaagcccaacacccacccaaccttctgggtctcctctttgggactgccttaacatcgtgtcctcaatcatttcaaggcagcaaacctgccacattacaattcttgaattacttattcgtgaacaacttgagagcagggactgttaccttgcattgtttcctagcatagcacctggtatatagtagatgctcaataaataatgtgtttgtttaattatattgattaagaaggaaggggctctgccccataatcccattcaatcattgcaatggaaaatcctcaagaaatgtttccagattcaatcgactgttgacaaagcagtaattttttcatagaaacgaatttcttctccatcacggttagaaagggactagagaaaatcatctgacttctcctctcaggccacatagctcatatttcctacctctaatctgaaatcctgactctcagaaatgtcctaaagttacctaaggatgtgcatgagctatgagaggtttggctgaaaggcagactgcaataagtgttttttttttttccatttctatagaggaacaatagacttttaattctaaatcagaagcggtaacagccatgcctattttccctttcccctctttgacatagtggctgtttgactgctgagcaggctggggtggtaagtgctgtaagaaatcccaaattctgaatgaattgttctcaagtggatgtctgtggaagaagagcttctgcacctgggttcatcagattcagtaaggaccacaaactgttggtccctcccttaaaatgagcacatgctgattaaagtagatgttgcataaaaatgaagcacatatttttatggagaaaaggaaattcaggaagaaaatatgtttactttcaagaatttgaagggctgttaaatggaggagacttaagacttatttagaattttaatgagatttctctgaagcacaactagaacaatgttctttataacagtttctcctttcgttctatgaaaaaaacctgtcaaatggtacaccaagtgcagagtccgttggccctagcttgcctttgcagcccagtgtctcactgaggctttctatgctccattatttgcttacttggaacttctttcagctcccccatgttttctttccttggttgcccctgcctgggtcacacagaagactaccctgtagtgtggttagtagtgcacacacaagacatctccattagagtgggagccaccagatactatgtgatataagtgacagtaagctcattgattttatattctcattgattaatgtatttatcatcattcagcaaatatttatagagtttctactatatgtgactctaactcatcttcagggcttggcctcagggttacagttctgctcatcaaaataggtgctccccagagtgctcccactgtttcatatcctgtcattcatcactggtcatttcatagattattgacacatttgcaccaccctctctgctgaaatgggagttgcatgataacaaggactgagtccattacttctctgatgtctagcacaatggtcagcacacacagtcaacattgggtatcaacatatcatcattgaatagtgattgataaataaattaatgtatacataaatgcaatgagttttctgccagttgaagtatggtttgcaaagaaagggtggatccccagctgatggggatctttttaaaaagttattctttttggcattataccaaccatgctcggttgtggttgatttccttagttcacttccccattagactatgaactccttgagaacaggaagagttctatttgtctttgaaatcctagcagcacaggcacacaatcagtgtttgggaagtgcacaaaatgtctattttctgagaatggattgtttatagaacaagaatgctgaggcactaaagaaaaagtggcagtaatgtaatccgcttgttttgccaagccactaaaaataccttggtaaatattagctaatgtgcagccctttgcttgctattaagatttactgatttcaatagaaaggaacctaaaaactgagcatattatataacccagacaccagggacaatctctaatcacctaagagttcataaaatacatattggctctgtctgtggttagattaaatgccattatctaaaaaaagtaggatctgtgcaataataggtctgccatgtgaatgacagttttggttagtggatgaatttatcctgtatcattgcattctctaagaataatccctctcactctgaacaaataaatcaatagcattggctaacccagtgcatgtaaaaaacaccttcagtaaatgccaggttttcccgaataataaagacttccaacaataaagacttcttttaagtctgtttcttacataactgttgtatggagagattaacatggtatcttgtttcttcctggtgtgatcttacttttgtcttgtaaatatgtacttatgtctgtatgttcacctgtatctttgtgaacccttggaaaactcagtatttcagtgggtttcagagaataggccgggagattgatgataagtaagtgtttccggccagttgttattaggcacaacttttaggagaaacaagtgagcgatagagcgtggccaaggagaggaaggcaatgctggaacccaatccacgcctgctgcccagagaccttagctgatggcttgtcatgtcttagcatgttggtattcaagccatgtgatgttggaaagaaaaaatacctattcagcttggggcttggtctgagaacaaccaattgccttggtttaaatcacacgactccactatcaaattaagtgtttccaagtttacacaaattagcgtcagtccactgactgtcgcctacaataaattaggctgagtctaaaagaaatcagtctgcatagaaagaccaacaaccagcaccacttccttgctttttccagccatgaatgcttccagtcggaatgtgtttgacacgttggtaagtggaggctggggaaatcacctctctggaaagccaggcagataatgtttcatcattaatgcagtcatggaaactcaacgttattcaagtgatcaatcagggggtacttcttcactctacagaaatcttctttacctttaaaagtaaaatgaaattaagggaggctagaggagcagggtgctgggaaaaaaactcagaagttggtgtgttaggagccatctctggaattataatgtatgacaaagagaatgtggattcaattgataaatgttggttttagaatttactatttgagctgagagtcactctctggagagctgggtaaacagtgtgaccctgaatgcacctgggagagaggtcagtccacatgggtgtagaccagggtaaaggatgtgtgtacaaggaaaggagaagaccatttccttctctgtacctcacatgcaccatcccctaatcctcactggggacttgaggtcagtgagggcagtgtgggatgagaggagggccctcttgactatgtgcattgctgtttattctcttggcagcattttctttttttatgtctttagaacctgccctcaacatttcaaatcaccacagctgtggttttctcatcaccgcttcgacttggcgttggcttcttgtgttttcagctgggttaaggccttgaacaagacactgtgggatatcactattatttaaaatgtatcactcagttggtttcgcttcctagttcttacgaataaacacatttttcaagggggattttgaaatctattttaaaaacatatttgcatttaatgaaaaataccctgaagacattgcggaccagggtgggcacaccttgatattcttgggcatgggggaggaggtaatctagcgtttatgactttgggtttcaccactgtcaggtgtttatgggacaggcccttcaccattttgctgtacaatggaagtcacagtaatgtcatctataaaaaatcaattgagcaaataggattttgaaaaatgtaattcattcactgaattatttcatttacgtttactgaataaacagtaggcactcatcaactgtgctagcaattgtgatataggaatgaataaagtatggtctgtctttatggagtattacttaaatcagtgctccccagtcctccagctttggagtagggaaggaagtgttagatgtgttgatggtggctctcatactattccttttgggaatcttgggaaaccgtggggagagagtaggaacaggcttgtagatttatggagaagccctatgagaccatctggttggatctgagctctgttctaaatagtgttcagcatttaacaaaaagaaatatgaccaatacttgtctgaaaatattttagggaagtgtgactttagaatataacatttgataactgagacacggagtggtagaagctcccctagactagaggcagggagccctatattctagttgtcatcctgccactggctaggtacatgcatttggacaagttatttaaattttctaaatctcagttttctcatttgataaatgagagaactgaattgaattaggatttttcttgatatatgagtatcaatagaagtacatagatgatttaggtagtatattgatgagtgttttattggtcagttattcatttttctatatctcaaaaacatacataatgcttcaagtttgtgatttctcagaaattattgcttaacataaggctaaacttatgagaaggtgatttaagtaatattcaataaataaaaatacaggtcataattggttattacaaacatatttaaggttgtgtgagactaattgaggtcaggaaacacttgaatatataatcacttagtttgtcttcatttctagctctctgtaattattttgcctctttatgtttgagtaacatggtcttccagtggaaagtttctatcagaaatagcattgtggtatccagaataaacttgtcagcttgccaaatgattagtaacccagataattttgaatgatcttttcgtagttaggtctttcatgtgggtcacctagttcactattgctataaacataatccttttttgtttttctttgatgtgttttcagatcagggtgttgacagaaagtatgttcaaacatcttcggaaatgggtcgtcactcgcttttttgggcattctcggcaaagagcaaggctagtctccaaagatggaaggtgcaacatagaatttggcaatgtggaggcacagtcaaggtttatattctttgtggacatctggacaacggtacttgacctcaagtggagatacaaaatgaccattttcatcacagccttcttggggagttggtttttctttggtctcctgtggtatgcagtagcgtacattcacaaagacctcccggaattccatccttctgccaatcacactccctgtgtggagaatattaatggcttgacctcagcttttctgttttctctggagactcaagtgaccattggatatggattcaggtgtgtgacagaacagtgtgccactgccatttttctgcttatctttcagtctatacttggagttataatcaattctttcatgtgtggggccatcttagccaagatctccaggcccaaaaaacgtgccaagaccattacgttcagcaagaacgcagtgatcagcaaacggggagggaagctttgcctcctaatccgagtggctaatctcaggaagagccttcttattggcagtcacatttatggaaagcttctgaagaccacagtcactcctgaaggagagaccattattttggaccagatcaatatcaactttgtagttgacgctgggaatgaaaatttattcttcatctccccattgacaatttaccatgtcattgatcacaacagccctttcttccacatggcagcggagacccttctccagcaggactttgaattagtggtgtttttagatggcacagtggagtccaccagtgctacctgccaagtccggacatcctatgtcccagaggaggtgctttggggctaccgttttgctcccatagtatccaagacaaaggaagggaaataccgagtggatttccataactttagcaagacagtggaagtggagacccctcactgtgccatgtgcctttataatgagaaagatgttagagccaggatgaagagaggctatgacaaccccaacttcatcttgtcagaagtcaatgaaacagatgacaccaaaatgtaacagtggcttttcaacgggagtaaagcaaagtctctaaagctcctagtacctagaagcattatgaagcagtcaacaatttaggggtacgaaagtaggatgagagccttcaaagtctaccagcacaaagacccctgagccccgcaattgtgatcccacaagacatgcatctccacaaggctactgtattagaacgtgcaatgcatttatatgaaactggtgtatggaagacataggtgctctcttgaaatcttaaatatgattatttgagctcatataaggtggattggagcagataaaattatcaaaagtttcatgaacaggccaaacaaaatattttttaaagtttccttaaagaagttatgaactttagaaaggatcaggggacaataataatctcattttgattctactgataagaatgactccacttttaatgtggacttttactcatggaaaaattgtctcctaatttggggagatgaaccaaccaatcaatgacaagaaaacgcttacacaaagaacaatttgaggctctaagcttctcatgtggtacgtttagacagaggctaaatctgcacactagaatcttgatgataccttcctgcaagacagaatgctttagttaaaagtggtgatgatatttctttcaatctgtattggatggcttaaagggctataaatctgtttataaagagcatttcctgctcttcgaagacagcaatgaggagttggaaggtgcaaagtcagtagagaagggaatgtatcattaatgcacctgagaagaaacagtttcatgtgttcctccacctagagtttgtactggaatgctatttctaaagaagaagtgggaaagagagaggaatgggatggagccccacagtcagaatgttactatgtctttctttccctgacagcccatcttcctaaaagggaccagcttatggaaggctcgaccttgaggggaaagttttactgtgaaagtcttcttcagatccccacctgcatcattccgaatgtgtcctggaaaaaaactggtactcaaagctgcttaggaatcaaaatgttttcagtgtgttgattaatatagtaaatttctgaaactgtgcatgcactttgattattattattactatgcattaactgagtcaggttccaggtgaaaatcctcttgcagagaggaccctctcctggaaggggcgggaggagtggagaggaagcagataggacacatttgttgtctggagtcctcaggaggaaatgaccctggccacagacacaccccttccggtacagctccatcacgcctctccagtgtgagtcttggcacataaaacggcagctgcccacagttgttgggagggatggcttatgtttttccatgcctgggctgtatttgtacagatccatgcaccactctggtccttctgactaagaacagtgggaagtctgatggttttagggttgcacaccttgtcagtggccataacagtggccatagctggcccatgtggaactctcactctgtacctgtgagtgctttggcaccacaatttaatgtgctgacaggaaaaagaaatcaggtatcacaagcttgagggagctggaattctctgctggcccactgtcatgatgtagccccttcataaactggagggaaactgtgttgacacttgttcccatcagcatgcactcttcctggtgtattctcctgctggctggcagcatgcatgtagatggctggaagtgagatggtcataagcaatccattccctttgattgttagggaggtgaacaacatacatctttctgattggtatttacttctgggttatttggtggaggcccatctgcttctaaatatccctttgctaggatcaagacactctgcacctggagtctcttttttaatggaaattcccattgaccctctagcaaccattaacacaggtacatccaattaagcccctaggaaaagaggcctggaacaggtaacttttgataggtctaaggagtggctggaaccccaaagcgcataacactcctgtgcattttaagaaagggggtaacaagggaatgggtgctcaagtagtaaagagaaatgaaaaatagcctgagaaggccaaactgcttgtaggttaacaccactgctaaaggctgcctttttattacaatgcagtgacatttttcccggtggaatctgactacatcagtactgctatttgctacagatgctgggttattctatttgctgatttcaaaagcatgtcaactgttctaatttccttcgtgaaaaactgcatcccatgatgcattattatattcaaaattttccttgagactgattctctttgaattgcccagttcatctctgttgctatggggattttgactaagagcgtttgatcctggttgaatcttcctggacttaggttggctcaagctccaatatttaagagttaagatttgggaggttgtctttaatggaaagcactaaatgtttaaaaattatttattccttaagagagaaaaggtagaagggaaagatccttttgtgttgccatgcctttttaagacatgggctgataggtgactgtccttctctatccatcactaaggggatgtgcaactggaccttccagaagaactccctgggcggattgcagagacggttgaggaagtgtcttccttggggatttttcatgaaacagaatatgggtcctcaacaggatgcttctgtgaatagcacggggatctttccctgtctagaacaaacgttaggacagcttctgatggaaagaatgcaaatgaacccggccccgcccctgggccgttgttgcctgccattacaggaagtgtgtgtcaatcaaagcttgacaggggagatagagcattttattttggaagccagaagtttgagaacaatgactggaatttcctctttctgtccggcaagggctgtttgtcattggggagataaaagtccaggggcagggaataaaggttatcgggaactgcgcaaggcagagccgtggggggtgggggggggtgggaggaggggttatggaggaaatctatttcaatgcctgtcattaagtttccattaaaagaacattcagttaggaattcaaaaataatttaatctccccagccagatgcacccagctggactccttggagctgagccccttggagagggagatttgcaccaccgttgcaggggccaggagctggggtgcgtctctacccagcgcactctcgactgcttgggtgttctggaagacatcggtatccttcagacaagtgggaaaccccaaggcttgtgcagtggcagaagaaagttatttactaggagttatttactacgttgttaccatgtccgaggttctgtttacagcattttatatgcagtccctcatgtaattttcccaacaatcctatgaggtcaagactatgattatacctttattccacttgaggcagctaaggtaaggaaggtgtccagagacattacctggaaaatggcagggctggcatgcaaaccccgggcagtccgctttgaaagcccatgagtttaaaatccctcgtcgacatcctaggagggaccatcctctgagcagattccccagggccatcgcacacttccctgaaacccacggatgactggcgcatgctcttgggatgcgtcttatactttgggagaaaccactcattgctcagcacaagacagagccctggcgagtgctgaacgaacatctctggaattgcaggttctaggaaaaggcagtcttttcccatgagctctaggtcatccaccaggtcagtatacggaagtatcatgggtgtcctgaagatttgattagcccattggtgcaaagtatcttcctaatactaatacacatacttctctctctaaatatacacaaacactaaatatatatacctaattatatatatataattaaaaactatgtgtgtgcatatgtatgtatacacatacacacacacatatttatatttcagtctttgatgtagaggcagatattatttccattttgacatgggaagtggagcctccattctccctggagaacagcccctgtgttctctactcacctctgtattcctagcaccagcagagttcctcacacaatccatacatggttataatgaataaaataaaccaatgaatgatttgctcaaggtctacatggctagtagtggattcaaacccacatctgtccaatgagcttttgactgacctatgtcattgaccagtcattagtcaaggggcctggaaaaatgacttaacttcattaagccccagtttctttatttgtagaatggagttttgtaatagagttaaggaggggattcaatgaaataatggatatgaaaaatccatctgttgaaagtaaatggctgtgcatatggcaacatgaggtgggagcaatgggtttgaaggtgaggaatgaaggggaggacactggtcccagagcaaaccctgcgcctggtgcttcaagggcaaagaaagcagagccagggcagggctgatggagaccagtggaggcctgggggacaagaacagtgcctgcaggggtctgtcccagctgggataggctatgagttggggggatttgagtagaatcctggtgctttgggtttgtcttcaattcaagagatgcttattttgggtttactgtgagccaggcactggggaggcaaaaaagaggaagcaagggtcctgcctactgcagaaaagatcccagagctccagccagttcagaggacgagagttaaactggaaaactgctgatgtcggggagaatctttttattgtcttatgccatgtgcttataatagtttcagccaaaaacaatattgactccactgctaacaataagactattgattacagtcttaaaagtatttgggattaaacatttttaaatcatccatcctatagatattctttatataacaatgtacaatcaacacagtgataaagtcacttgaagtagttcttttctccgtgtgattaggtaccaactggacataggttcatttgtttccatttatttgcaatcgttaaagtctgtttattgttttccttttttgatttcgccatttcttttatgaattatgcaaggaatttatataatttcaaaaccacagaacagggtttagaaaacatgcttccattcctgtgccctccactctatttcttcccgttctataaagggtaagcatctttattatgttgtatcctgtggcggtttctttgtgaaagatgtaagcaatgcatatgtgacatgttagtatttacatgctgctccattcttacacaaaaggtaacactctagaaacaccattctgcagggttttcttcacctaatagaatgttctgcagatcactgtgtagggataagtgctgataataccaacatctatgcgacaccctccctcaccttcgtgggtgctcttgcagtagttgctgggatcttgctccagaggcccctgctgtgcagttttgagcctgagagatggtggccttttctgttttgccttcctgaaagcttccctctctttgcagggtgactctagggctgattctgcctaccctgctggggaataagctgggctctcaaccgggctcccagtgggagagagtctgcccaggaccaacagctctttgaggatcaaacctccctggaattttggctgggtagaaaatcagaagtatcctcaagagagacatcccactccagtacatggggtgggggcttggctggagaggggggattcaattcccagagcattctggataacccctttttgattagaatcctctgaccctttggggttagggtcatggagctcaccattgtgtggaaaattttgtgcgcaagtatattaaaatggaaatgaagttaattaatgaaatgaataaaggctacaaactaagtatgaaaaaagtgcttgaaggaggcaggggaaggcttctaggaggagaaggcagttgatctaggttcgaagtgtggttacgacttgacagagggaaaggcgaagggtagagaggtgtgaccaggtgggcacatgttccagacggacggagccacaggagcgtgaatgtgtctgggggctctgggaagtgccgtgcagttttacatggccacagcatggccacgtggaaggaatggtccaaagaggcagaagtttggtgccaagccgacttgagtttgagtcctggtttgatcagtcaaaccaccagagtctttgagggggcatgggatgattaaacaagtattttgggactatatctcttgtgttggcatgagggacagattagagaattagaggcagaaactaacttttgagggaggcagagaaagtgtcgtcatttccatttttcaggatgggaaactgagtctcagagaccctatgacttgcccaggtcatgtagctgtgaagtggggaagcaggggtcagaagccagggtgcctgcctgctagttagcccagcgttctttcctgtgcctctcccctttcctggagccaccccacaaaacttttgtgcctggcagtcactgttcctgaaggaaaatgcacctggaaggtggtagccaggatcagaaaggcaggtgagtctgggaatggataaagccctgcacccttgcactgcttcttttgggaacacagaggccacgtgtatctacagttgcacttagcatctgaggaagctgggaagccctcactggaagggaagacacggaggcaccttcatctacaccaacaaagtgaaagtaagcaatcactaatgagtgggctgttgaggccaccagcaaagttgtttttagttgaactaaaaatggcaagtagagaccacaattatccctatggttatctcagttccccacatcaatggccagatgcaacctgaacctgtgatagcctcggaaaaacacagcctgatgaagcataaaagaaaaaagtaggcaaggaaggaggagggatgaaggcaagaaataaggtgcaaggttcaggggctttgaagacagacagatttgggtcaaatcccagatttcccacttattggctgtgtttagcttgaacaaattcttagcctttctgagtcttttttccagttgtgaacaacaataatacctaccttaaagggatagtgtacagatatagtatgaaataatatttaacaaaacactatgtaaagaacctagcactgtgtctgatataggctcccaataagcggtagtttgagtgatgatgattattctgccgatgatgggcaaggccaaggcagggtgggtctggctgatgagcgggggtcccatgctgtgccctcgtttcctctgtcctgggcctcatcgtttcccagcctacattcctggccttgctttccatttccaggcttgattttaacctgagacacagtagctcaccttcctccctgtgcctgcctccgaggtgaactcacagaatcctagaagcttagcggtgagagggacctaggcaaagcctgaccctaccctgttatttcataagtggagaaacttagggtccctaagtttctgcaggggggcctgttcaagaggaataatgtgtcttacccagcttcagaaagagtcgattgctgacccatcctgtgcttcagatttccccctgggtggaagtgaagacaggggagggtaggggtcgaggggggatcctactagaatgggcaatcctgaactaacctgcactttgttggcgaggtgtgctttggccagcaggtggcgccatatacttccagatcgcaaaagtgaaactgacctggttgaaaagtagtctgcctctgacggttaagagggcttggctatacccagaaagctcttaataatgcttagaatatttaacagagatatataaaatattgggccttctagtcattgctggggtgataaaatgaccgtgaaagacataaaaaaatttaaattgtgatttaaatatagaagtttatcattctagagagattagactggctcgaagaggaagttgttaccatgtgttagagtctatgagattccatgtgctttacattttcctgacaataaagctgacataataccatgactcccattttacagatgagaagtctgaggcccagagaggttaagatgcatgctcatggtccatacacggctagtcagggcagagctgctatgtatctatatattcaacatttatacagggtttattatgagcagacattattttaagtgctttataagtatctactcatttaatcccagtaacaactgtagatagcagaacaggcacttttgaaagcacaggttagtctgggtcaaaattcatgggctttcccaggaacaggccagctcctgtctcccggaggcctgagtccaaattctttttcagttgctttcatatgaatttggtaactcgcttaccctctctgagttgtgggtttctcattcgtaagctgatgataatgaaaccaaccccatgtggctgttgagaagatcaattagtagaacacatgacacagaattaaccacaaagtcatattccttgttaagggattatttttaccacagacacctaatagatgaattcacataaacgcatgtttgttgcaggattatgtgtaggggtgaaaagcctaagtgtactatgacagggaaatcagttaatgcagtgtgaaatgctacgctattttttttttttttgagatggaatctccctcctgtcggcccaggctggagagcagtgacgcgatctcagctcactgcaacctccacctcccgggttcaagtgattctcctgcctcagcctcctgagtagctgggattacaggcatgcgccaacactcttggctaattttttgcatttttagtagagatggtgtttcaccatgttggtcaggctggtctcaaactcctgacctcgtgatccatccgcctcggtctcccaaagtgctgggattacaggcgtgagccaccgcgcccagcctgctattttaaacaaatatttgggcactgaacaatgtcctacagacacatttagaaaataaaatacactaggagctccatggagctcatattcttggggcagctgacagggcacaccaatgtcagaggggagaattggcacaaggcatccttacctagtgtgaggcaccgaggagagagagcttctctgagaaaaagacatggaagtgaaatgtgaagcaaaaggaagagttagtcaaatgatgggtggaggggagtccaggaagaggaaatgtgtccaaggttcaggatgtgagagcacaacactccatacaccacatctaaaaaataaggaatgattttagacaatgtcctcaaaacatcaaatgaaagaagtgtgtaccagaaattataaacatttttttagctaaaaaaggttttaagtgtgaaatgttttttaaaatgtagaattttgttgcatatatatgtgcatatacgtgtacccaaaaagactcagaagtaaacataaatgcattctttcacttattcactcactctatcattcactcatcaaatgtgttttgagagcctgtggcactggggcctgctgaggcccctgggatagaacaaaaaaaacagtccagggcccaccttcatggactgacttcctagaggagggagacagaaaataagcaatgatgcatggcatacatttaaaataattttaaacaggctgggcgcgctggctcatgcctataatccaagcactttgggaggcccaggtaggaggatcacttgagtcccaggagtttgagaccagcctggcaacatagcgagacttcatctctacaaaaaaaaaaaaaatggaaaaaatagtctggcatggtagcacacacctgtagtcctaccttgagagactgaggtgggcggatcacttgaacccaaaagtttgagaccagcctgggcaacatggtgaaaacccgtctctacaaacagtacaaaaattagccaggcatggtggtgcacacttgcagtaccagctactcaagaggctggggtgggagaatcacctgagtctaggaggtggaggctgcagtgagctgtgatcacaccactgcactccagcctgggtgacagagccagactctatgtcaaaaaaaaaaaaagataaaataaaattcaaatagcgatacaagaaaatacacaagggtgatgacgtggagaacaactcacagggagggtgtttcctcagaccaagtggtgaggggaggcctccctgaggaggagccaccgagggccaagccataggaagaaggacctagtcatgcagacttgggtggagaatattctaggccagtggccttcaatctcggacacacattggcatcatccgagagcctcagaaactactgctgcttgccattcctcaacctttgagtctgccttattggctgtagggggacaatctgggcattgggattgtcacaggaattttcctaagctctcctggtgactctgagaatgctgacccctgagaaccccgggtctagtggaagtgactcacagcatgatctgatcagctttgggtgggagcatactagtcatcaaataacagagactgatgtccaggtctttgaaaacccccagggcaccagaaaatcctgactccagaggtcggcagaggggcccggggattctgttttcataacacgtgctctcaggtgactgtatccactgctaggcccaacagatatcctctgctaggacaaatgagaaacccacaactcagatgaccagtatgaccactatgctcccacccgaagctgac

SEQ ID NO: 8 - DNA, 458 bp, Homo sapiens
  misc_feature (1)...(458): n=a,t,g or c
ggcagcctggaagaggaacagaagcnggntcggggtggantnagaatactanncttagcttgagacattttgcaataaggaagctatatctagagtgcttatgtgactcacctaaggccactcaacaagtttgtggcagaactggattagaactgcacagaaaacagccaagctgggatttgaacccatgtagtccaactccaaggcctctgcccctaaccactgtgccataccacctcccaataatcaacagcaaaattataggtctaacaatgttttatagacacccctccatttatgtgatgggtttgcatcctgataaacccatcataagttgaaaatatgatcataagttgaaaatatgatcataagtcaaaaatgtatttaatatacctaacctaccaaacatcatagcttagcctagcctgccttaaacatgctcagaacacttacattag

SEQ ID NO: 9 - DNA, 1890 bp, Homo sapiens
gacccacgcgtccggggaggagaaagtggcgagttccggatccctgcctagcgcggcccaacctttactccagagatcatggctgccgaggatgtggtggcgactggcgccgacccaagcgatctggagagcggcgggctgctgcatgagattttcacgtcgccgctcaacctgctgctgcttggcctctgcatcttcctgctctacaagatcgtgcgcggggaccagccggcggccagcggcgacagcgacgacgacgagccgccccctctgccccgcctcaagcggcgcgacttcacccccgccgagctgcggcgcttcgacggcgtccaggacccgcgcatactcatggccatcaacggcaaggtgttcgatgtgaccaaaggccgcaaattctacgggcccgaggggccgtatggggtctttgctggaagagatgcatccaggggccttgccacattttgcctggataaggaagcactgaaggatgagtacgatgacctttctgacctcactgctgcccagcaggagactctgagtgactgggagtctcagttcactttcaagtatcatcacgtgggcaaactgctgaaggagggggaggagcccactgtgtactcagatgaggaagaaccaaaagatgagagtgcccggaaaaatgattaaagcattcagtggaagtatatctatttttgtattttgcaaaatcatttgtaacagtccactctgtctttaaaacatagtgattacaatatttagaaagttttgagcacttgctataagttttttaattaacatcactagtgacactaataaaattaacttcttagaatgcatgatgtgtttgtgtgtcacaaatccagaaagtgaactgcagtgctgtaatacacatgttaatactgtttttcttctatctgtagttagtacaggatgaatttaaatgtgtttttcctgagagacaaggaagacttgggtatttcccaaaacaggtaaaaatcttaaatgtgcaccaagagcaaaggatcaacttttagtcatgatgttctgtaaagacaacaaatccctttttttttctcaattgacttaactgcatgatttctgttttatctacctctaaagcaaatctgcagtgttccaaagactttggtatggattaagcgctgtccagtaacaaaatgaaatctcaaaacagagctcagctgcaaaaaagcatattttctgtgtttctggactgcactgttgtccttgccctcacatagacactcagacaccctcacaaacacagtagtctatagttaggattaaaataggatctgaacattcaaaagaaagctttggaaaaaaagagctggctggcctaaaaacctaaatatatgatgaagattgtaggactgtcttcccaagccccatgttcatggtggggcaatggttatttggttattttactcaattggttactctcatttgaaatgagggagggacatacagaataggaacaggtgtttgctctcctaagagccttcatgcacacccctgaaccacgaggaaacagtacagtcgctagtcaagtggtttttaaagtaaagtatattcataaggtaacagttattctgttgttataaaactatacccactgcaaaagtagtagtcaagtgtctaggtctttgatattgctcttttggttaacactaagcttaagtagactatacagttgtatgaatttgtaaaagtatatgaacacctagtgagatttcaaacttgtaattgtggttaaatagtcattgtattttcttgtgaactgtgttttatgattttacctcaaatcagaaaacaaaatgatgtgctttggtcagttaataaaaatggttttacccactaaaaaaaaaaaaa

SEQ ID NO: 10 - DNA, 2148 bp, Homo sapiens
aagacaaacactttccttgactttgagaaataatttaagtcaaagaatctgctctatgctaaccaagagatagagcacagcaaagatctgccagccccaggcctctacctagtggcctggaaattcaagtattcttattggtggaggccatttgtttctgattagaagctgtctaaacctcctactcctcaactcaaaggaaaacacagagcataccatggccaagaaagttgcagtgattggagctggtgtgagtggcctctcctccatcaaatgctgtgtggatgaggacctggagcccacctgctttgagagaagtgatgacattgggggattatggaagtttactgaatcttccaaagatgggatgaccagggtctataagtcattagtgacaaatgtctgtaaggaaatgtcatgttacagtgacttccctttccacgaagattatcctaatttcatgaaccatgaaaaattttgggactatctccaagaatttgctgagcactttgacctcctgaaatacattcagtttaagaccactgtgtgcagcataacgaagcgtccagacttctccgaaactggtcagtgggatgttgtcacagagacagagggcaagcaaaatagagctgtctttgatgctgttatggtttgcactggacatttcctgaatccccatttacctttggaagcctttcctggaattcataagtttaaaggtcagatcctgcatagtcaagagtacaagatcccagaaggctttcagggcaaacgcgtcttggtgattggtcttgggaacactggaggagacattgctgtggaactcagtcgaacggcagctcaggtacttctcagtactagaactggtacctgggttcttgggcgctcttcagattggggctatccttataatatgatggttacaagaagatgctgtagttttattgcacaagttctgccttcacgttttctaaactggattcaagaaaggaagttgaataagagatttaatcatgaggattatggattaagtattaccaaagggaaaaaagcaaaattcattgtgaatgatgagctgccaaactgtatcctctgtggggcaatcactatgaaaaccagcgtgattgaatttacagaaacctctgctgtctttgaagatgggacagtggaagaaaacattgatgttgtgatcttcactacaggatatacattttcttttccattttttgaagaacctcttaaaagcctctgtacaaagaagatatttctatacaagcaagtctttcccttaaacctagagagagcgacattagccatcatcggccttatcggccttaaaggatccatcttatcaggcacagagctccaagcacgatgggtcacaagagtattcaaaggactctgtaagatacctccatcccaaaaattgatgatggaggctactgaaaaggaacagctcattaaaaggggagtgtttaaagacaccagcaaagacaaatttgactacattgcctacatggatgatatcgctgcctgcataggcacaaagcccagcatcccacttctgttcctcaaggatcccagactagcttgggaagttttctttggaccatgtactccttatcagtaccgcctcatgggccctggaaaatgggatggagccagaaatgccatcctgacccagtgggacagaacattgaaacctttaaaaactcgaattgtccctgattcctccaagcctgcctccatgtcacattatttaaaagcctggggggcacctgtcctacttgcctctcttctacttatctgtaaatcttcacttttcttgaaattggtgagagataaactacaggacagaatgtccccttacctagtaagtctttggcgaggatgaacctgattgttacaagggttacaccaagtcatgctaattctatctccaagtatcttgtgcatccctcctctgctctccatcataactgctattagccaaattcaggcccagtcatctcctatctgaattattgtattatcttcttctttgttttcagtaccctctttcttgccaccctttccaatgcatcttctaccctgctacctcagtgattattctaaaataaatatatatgatatggtttaaaaaaaaaa

SEQ ID NO: 11 - DNA, 391 bp, Homo sapiens
ttcaaaagtggaagcttgtttaatattgctctaccatcatcctgaaaggcataataatttgagttacacatctgaactgattggagttacagaatcatatctcctttttgcatttaacaatatatacaatataaaataaatacatttacacaaatggacatttgctggagcacacagtatggtacacatcacaaaaatatacaattgattgctttacagatgtgaagcccatctacagctatagacatggttttattattattattattatttttactactggctataatgcaactcctggattattataagcagtttaaattttttgtccttttacgatctttgcacataagactgccataaaatgtttttcctaaggcaggtaaacagg

SEQ ID NO: 12 - DNA, 341 bp, Homo sapiens
  misc_feature (1)...(341): n=a,t,g or c
gaggaacacgcagatgatcagccggtccaccttgtccttgtgctgctccagccactctcgcagcgtggccagcacgatctcggcggccgctcacaggggtagccaaacacgccggtggagatgcaggggaacgccaccgagcggancggtgcatccagcagcaggtccagactgctcaggtagcagctgcggantcggcagcctgactggcgctgggctccccgtaggcgatgggccccactgtgtgaatgacgtacttggccgggagccgatagccgccggtgatcttggccttgccagtcttacagctctgcagggtccggcactcgtcggtaagcagg

SEQ ID NO: 13 - DNA, 248 bp, Homo sapiens
atttaaatgtttttattaaaawwwattaaagaccttcatggcacaacttcttcccagcacagttatggtttagtcataccaattacaatacaattacaaccaataaagcaaggtggggagggccttctggcttcaaacttaaaaaaaagcagaggaagaggggagggaccacttcaaacaaagtttaaaaatactttaaaaaatctttcagagtaattgccaacataacctttcatgttggccattcc

SEQ ID NO: 14 - DNA, 277 bp, Homo sapiens
gcttgttataaattttattagaatagaaaataatacatacagataaccataggatacacacacaggaattgaaagataaattttatacttttcaatatgaaacaaagtgcatatctcatggagatatattgctagaaacaacatgaaacaatagagcaatcatcttgaaaatgaaaagtataggaacatataggaattactaaataataaaaaggtccaacttcattacatgtagcataaaatacaagtattggagaaagtgggaataacaatggtc

SEQ ID NO: 15 - DNA, 212 bp, Homo sapiens
  misc_feature (1)...(212): n=a,t,g or c
gtccagattcagaaagagtaagtttatcaacatctggcatccctcatactttgtgaagatagatcttctactgcttaattatgagaaatnattttattcaaagaaaggagctcttaatcttttgataaaacaaaataaaggngtagagagctgactagatgtcaagtgcttgctagaaatnattttnaaaatgcttctacacgtaaaatgta

SEQ ID NO: 16 - DNA, 250 bp, Homo sapiens
  misc_feature (1)...(250): n=a,t,g or c
gcattttaataaacttaatttaatgaagcgctgcattccacaagtacagtcagtacagtagctctcctttgggatggaaaaattacaagaagcaatgccgaggaccgtgaactgtatacagaagccttgtggatctagaaaccaacagtgtgtgaacttaggacattctcaagttttaaaacgtggccattataatatcatcacattacataaatntcacatcaccaatattcgttttgtttttttcttt

SEQ ID NO: 17 - DNA, 305 bp, Homo sapiens
  misc_feature (1)...(305): n=a,t,g or c
gaactttgggaaaattatttatttctccccacggggttcagacaagtaatttcacatttcattgtaagtcaagggtaagaaaacattttttgtacatccatcactaatagagatcacagtatgtcaatgaaatatttaaatacactgtacagagattgctttttaatggatttctataagtagtattaataggaaaaagcatataatacaatctactctgtatctaagagctttaatttattcaaatattggaagaaattcatctnctgaattttncttatttaaaaagcattatgagaactgat

SEQ ID NO: 18 - DNA, 354 bp, Homo sapiens
atcattgacaatgtttattatcaagaaactttaggttttttaaaagaatgctcgttttagaatacaccaagaggacactctgtgacaggacatatacaaacaaggataattaaaatattaaatactatctaaattaaaagaccataattcaaattgctaattataatatttgtgtcggtagaaataactatagttccccttcatgaaattcacccccacgttctcatgaagactatgacgtctcaccacaatttcagttatttaatttacaataatcaatgctgagttttctgtgctgaagcatgcactgttacagaaagcacaaaatcctatttacagggatttttagttttc

SEQ ID NO: 19 - DNA, 287 bp, Homo sapiens
aacgtaaacacaaagtctcatttatttttgtctgaagcacacaggagctcactcagcacaataacagtaagcgaatcatacaaatattgagaaaaaatgttcctatgaatacatacatgtatattcttaagagtagcgatcaggagtttaacaacaaatgtaaagtggttttctctaaagaatgctttctgacaggcttttgggttggaaatggacaggtaaatcactgtcacataacaggtaagctaagaataacttctgttacccaagtcatttgaaccctgtgg

SEQ ID NO: 20 - DNA, 381 bp, Homo sapiens
  misc_feature (1)...(381): n=a,t,g or c
ttttttttttgaaatatacaaacanagnatattttttattctgggcatagttcatgtttttaagaaagtaattagtaattaattatctgacactgggtaagaactggaagattgtgggagacttataaattatataagacttataatttataagacatataaattatgactctatgtaaaatatcagtggggagaaacccctcattttccattgaaaattctgggtaacttttaagtacttnccaaaaatagagacaatttccactgggtttanataatgggatgcgggaaatgnaacaaaagaccatccctaantaactgacggcatttaggggtgggctaataaantaaatgccagttttttgccaactctttcttttt

SEQ ID NO: 21 - DNA, 484 bp, Homo sapiens
  misc_feature (1)...(484): n=a,t,g or c
tttttttccatgttaggtgcatgatccttcatcaataacatggaaaaaaatcaaaataacattacaccacacacaattggcatatcctattgtgtaagcgagtgcagaggntgaacacatcacaatagtgctgaacacagaatcacaagtaatgtcaaaatgataacttccaaccaaaaaagaaacaatcacaggccaattacttatatacaaatcaaccctaaagacaattatgttccaaataaagatgtccacaaaagaanttcaaaggcaacattatacttatttacaaatggcaactaggccatgtctttaacaggcttattaaaaattactatttcacattttccaaacatacggtngtattttttgtttgtttattttcaaaaggggcgggcttaactttggatggcgggggttttaaattaaaacttggtgggggtttacccggcgggggtttttttggcaccccattcctttgggg

SEQ ID NO: 22 - DNA, 439 bp, Homo sapiens
  misc_feature (1)...(439): n=a,t,g or c
ncattannctttatntcctgtactgtgaagtgtgttgaaatgtggaagttatttcacaaagttaacagggtcttcaagacagaagagatatacgtgcagagtacacacatacacctacgtacacacctgtatatgtcgatgacgacagcatggagggaatgaacttgtgcatggagaagggggctttttttaaacttgaaagaaaccagcccattctgtgtgtgtttggaggaggggagcctgtaaagcctatttaccttgaatcccctctggcttacagctgcagagagcaaaggagagcagacatattctaggattggggcagtggggatgatgggtgattgcgttgctgctcaacgagtctggggtttgcagggtccaagggtaatgaccctttcccctgaggggccctcattcaaaggggctgagggttgcaagc

SEQ ID NO: 23 - DNA, 389 bp, Homo sapiens
  misc_feature (1)...(389): n=a,t,g or c
cangtattttgcaaaatttccaaggtaaacattagctccacatacagaaataaaagagttctttaagaactagcattgaattcatcacaagaatcatcaaattatgataatggaaaacaaacttgcctatgaccaaagctactgagctgaagtgaagagctgtctttacaaagntccctctcattaagcccactgccctgcgnctgactcaagccatcatcatgtatgtacgntgtataagaaaggacactggnccgggncatggtgggcncgcgcctgntaatcccaggcactttggggagggctgagggcgggncgtatcacgagggtcagggagtttgaggaccagccggggccaacatgggaggaaacccccgtgtcttacttaa

SEQ ID NO: 24 - DNA, 409 bp, Homo sapiens
  misc_feature (1)...(409): n=a,t,g or c
ntctcttcagaagctttattctccctgggaggggcacacctcacccagccaagggngcnttctgactggacagagggcgtccaagatgcagacatggtgtgcaggcaggagggcttccactagccccccaggtgggaggtgctgtgcccangggctcaagagggagggggccccagccacgagggaggggcagggactttcttctcacaaagacctttcttcagtattcgaaggtcactgtcttgacccgcaggtactcgttcagagccgcctctcctagatctttgccaaatccagactgtttgaatcctccgaaggagncggccacgtcggtcttgttgtacgtnttgacaaacacagtgcctgcctgggagcttgtcactgacatacagggccttgttgaagtccc

SEQ ID NO: 25 - DNA, 414 bp, Homo sapiens
  misc_feature (1)...(414): n=a,t,g or c
aatanaggaataataaattgatttaataatttgaaagaactgtaaggtttaggttttgttcttatttttagtgcgactgagattggagtctgtttgtagacatatctgaaaaaagtgaagggggagatggaagatggtaaatgccaaggaaaagatggaaggataaatcagtgtaataaaaaggagcacttctttttcgccaacagaagtaaaggtaaaggttaagtgtctgagttaacgaatggattgttgacctctggggagggtgctcccatcagctcagctttgtgacgacctaaggaatatcccttccacacctttcctgatccaatcgttctgggctgcataaaaccacctaaatcaatcaactgttacacttcccttagtgctaggggcatattcctnataactccc

SEQ ID NO: 26 - DNA, 284 bp, Homo sapiens
aagacagagtggactgttacaaatgattttgcaaaatacaaaaatagatatacttccactgaatgctttaatcatttttccgggcactctcatcttttggttcttcctcatctgagtacacagtgggctcctccccctccttcagcagtttgcccacgtgatgatacttgaaagtgaactgagactcccagtcactcagagtctcctgctgggcgcagtgaggtcagaaaggtcatcgtactcatccttcagtgcttccttatccggggaaaatgtgggcaagg

SEQ ID NO: 27 - DNA, 440 bp, Homo sapiens
  misc_feature (1)...(440): n=a,t,g or c
aagtcttgttccccatttatttttttgttgtgattcagaaatacaaggtatgaaaattagattacaattctgccacaaaagcttctaaagtagcaaacacaactttgtgtatcaaaatagccatgtgcgcttttatcagttaaaaagtctttagagttatcacatcaagcaagtgtaaaatataatagctactatctccccttcaaaattgcaaatccacagttactgcactgaagtataatccgaagagcaagatttagtccagaatatggaaggttctggttggcaggtactttttaaagctgacttactaagaactaaaagaaatgagaaatatacaaagcatcttatgtcaaagagtatgaatatttaaaagtggcctcaagtgagtaatacatgtttaaattagaaccngatgtaattaaatggttatggaattt

SEQ ID NO: 28 - DNA, 451 bp, Homo sapiens
cctgtttgctatcctttattaaagggcccacatcctcatgggactccagccaaaccagtcaggtcccccaaatatagcaggaggcctggaaggggaggggaatgacttatgatcctaccatgcctcccaagaaacagaaaccaccacagacagacagacagacggacaggggctggggagaacttgcctcactctcagtcctctcccactttcccccacttgaaaagaaagtcaaacactggctacgagcaccccagccccccaccccacccatagcagcgtttgtgggacacaccccctttgcaaggggtggccccgaggcagcttcctatctctctcttcactttggtttgctcctggcaactccgtgccctcttcctttcctcagcctccggttcggtctcccccttgtcttctatcacctactcggaccttctctctcatctcctgg

SEQ ID NO: 29 - DNA, 301 bp, Homo sapiens
ttttgaattcataatcatttattgtaaatcactcacagtttacacattaccagtggcaaaataacactgttaaacacctactggatgaagaacttcattgtgactatttccaattgccatcatatctttttctaaaatttaaaatttaacttttaaatcctacatcttttctgaaaatatctatcttcaaagtgctccaatactaacactataagccctttcttttgctctaacatctaacacaaagggcacactgtcccattaattccacatgcactttacaaagcaacttcacacacaa

SEQ ID NO: 30 - DNA, 465 bp, Homo sapiens
caacagccaaataaaaactttattactttttaggcttgacatctttaacagtagaacaagatcactcatgataaatctggaagatgcagatggaagacagtgcttgaagcccaaacaaatgatttactacaagtaattaaaagcagaatatgagaaaagcagcagtgtaaatgacgtaaacattaaaaaatatattagtttgtatatttcccccaggaagtctcacaggaagcacaggacacctgtgcggctgtttgggcatcctgggtacttcttgccctcaggtgaactcccatctctttagttaggaccagaatccacctggcttgtaggagaggaactacatgggagaagctgcattgaggcttttattattaatacctatgactcaaggaataccagccttgggggtgctttggggcctggggagggaagtgactggctctcctggctacactggagact

SEQ ID NO: 31 - DNA, 444 bp, Homo sapiens
  misc_feature (1)...(444): n=a,t,g or c
aggctgatcatactagagtatatttattaaatttcaccattatgatcactttgttataactaaattaaccctgacataaactttgacattttanaaacagagaacatactgatttttcaactattttacttacatgtgttttttaattctcatgcagtgctcataattaggagatactacatattcaccctcacattatgcttattaagaaccaagctcagagggtagaaaagtgccaacttcattttccataaacttcccatacatatattaagccactgttcttctaattatatacttatggtacattcttctgtaaaatgtataactgtagtcacataaccattgttangacaaggcggcaacatcatttcagattacaacaaatgagaccaaaagttgaagagaccacagcatataaaagtcatgagaacaccacacact

SEQ ID NO: 32 - DNA, 473 bp, Homo sapiens
gaaggtatttttaaaatctgggcacaccatatctatctgtaggaccctgggtcaaaggtcctacataactgatatgaaccataattctccatattaacaaaggctcggaaattgaaaccaagatcacctaactcgctcactttggccaatatagtacgaatttcagcttctttacaagagaagagtcctgagatgttaatatgcagcaattctgctgatgtgcattttaactttatgcaccaaggaagaaaggctaaggaattcacaaaagtaaaatcaccccctgaaaaacagatgctggtgattggagaaaaaagagcagtagaattaaggtgttttataaaccagagagtgttttgtttctgataggtaaagggatttcttcatatgttattttaataaaagggaatttcataggtaaaaaccaatattcaaaattataaaacaaatagaactgtttgtgcacaatcact

SEQ ID NO: 33 - DNA, 544 bp, Homo sapiens
ccagacattatggccaagcatgccatacaaaactgtgtttatcgtgaaacaatctgagttaggaaactaggattgttgccaccaccatttatttatctagttcataactaaggatagaacactatagcagtgctagagatgcaaagacgtccctgcccttaaggggttacaatcttactggagaatataacaggcacataagaagctggactacaaggaagcatgagctaacaaatgccagacttcggaaggcagcgtagtttgagaacatgggattcagagtcacaaaacccacatcctagtcccaacccagtatatcagttaacctctctgggttttttcccagctacaacattaaattagtaagactggagaggctgtctgcatgtttccatcatcattcagatcaaaagctgagatgagctttagggaggaggctgcacctgagcgggacactgaaggaaggcaaaggaggtgtttcagacaaggcaaagcagtactgaggtagctgtaagcttggagtttggatgggagcgacagccag

SEQ ID NO: 34 - DNA, 449 bp, Homo sapiens
aaacttgttttaaaaaaggtttatttgttacaaaaagttaaatactaaagctaaaaacatataaattcaggtcaggctatattaaaatacacacatacccttctttgcaaaattattaaaggttgaattaaacagatgctttaaataaaataaagtactctttgaggacatttttgtcagattaactataacagtgtagtgtagtttttaaaattgcagttgaaaagtttagctgtcttggaagtcaaatttatccaattgttcagacttctgttactacttaatatgaagccaccatgctggcttggacagaattaatttcattcatgttatggagaattctatattacaaatctggtcccctataatatgaacagtgagcagtcagaaatatacaaaggggttaaatagggtaaagactttggccaagaaaggaaaggccttagttc

SEQ ID NO: 35 - DNA, 429 bp, Homo sapiens
  misc_feature (1)...(429): n=a,t,g or c
ggagagtctcacttcatcacccaggttggaatgcagtggtgcaatcttggctcactgcaacctccatctcccaagttcaagcaattctcctgacttagcctcccaagtagctgggactacaggcacgtgccaccacgcctggctaatttttgtattttttcgtagagacggggtttcaccgtgttcgccaaggtggtcttgaactccaggcctcaagtgatctgcccacctcggcctctcaaagtgctgggattacaggcatgagcaccacacctggcctggattagtaatttcggatttccaaattcaggtcaagaagtggaatttattatgtggttcttgtgaaaaaaatataaatgtggccttttaaatatatttagtcttttttttanacaaagggctactcaaancattaccttcctgcccccc

SEQ ID NO: 36 - DNA, 512 bp, Homo sapiens
  misc_feature (1)...(512): n=a,t,g or c
ttttttttggtgccaaaactttactggaggtcacatgggactaggggccttctgtccctgccagcgcctccattcccaggcgatgcccgctgcctgcccacctaccctccggccccacatgaacaagctgtgtccccaccgaggtcacagctctgccctctggggatgggcgagggaggggccacagagccggagaggctcccgcaccgtcactcctgccgggtctccaagcagtccagcaccagtgcagcctgggtcttggcttcctgcaggaggctggtccttaaatgcctcgtctgtgatgtccctcaggttgatgaagcacgttgaaatatgcgccaaacacacccatntccagggctttggccgccacctggaggtctgaccggnaggccaggnttccaaaccgggcaagttcctgaagggccggcaaaaggaaggcaacggttttcgcaaagtttngggaacaagaaaattgccggcttaaaacctcctgtaggggccnccttgcc

SEQ ID NO: 37 - DNA, 395 bp, Homo sapiens
aacagtagacaataaacttttatttaagaaaactgattcagttgtgttggaaaaaataaagaaatctgatattaaacgttttctaagatcatttgtataggttcagtgtattcataagaagtccaccctgagatgcctgtaaaagtcaaatcgtaattacacttcaaactttaatcctaaattattgacagatagatagatagtgaccaacttaagggtaatcatatatgtgactaacatttgggaggaaacaggaaaacagtggtctcaaaacaacaatatcccagtctccatttgaaagagcatagatcttcggtaaatcattttgaaaactatgtgctttatttcccaaaagatcaaacttaatttttaaaagacacccttttcagaagtat

SEQ ID NO: 38 - DNA, 417 bp, Homo sapiens
ttccagttaatttagtcctttatttttttcattctccatagaatattggttttgtaacaacgaatacaatccaatatataacattaaaacaatccgatacataccattctgctttatgaaagatcagcaaaaatacataaacaaggatataactagtacatttataaaatacatcataacaatgaaaccaaaggatcccacacaataatcttcacatttgacatgctggttacagctgaggagagccagtgtctttggcaagtgattcatatacataagcgatgacactgactaatcctaacacttctgaaatgttcattctttaccagttaaacctaaaataaatcagcaagagtactgaaatataacaagaatgaaatccaaaatttgtcgaaaggggcaatgtttaatactagg

SEQ ID NO: 39 - DNA, 268 bp, Homo sapiens
tttttcaaataaatatcctttattaaagaaaaagaggaatattgttaaaagcaccaaaactgtaggttgttacattgcatgtacaacaagagaaaggtgattgcaatacttggtgtacaagtacttaactctgaagtcatgagtgtaaaaaacatgaaatacaaagcaatacaattacaatgcagaaaagctgcactaaagagcaaaaggcaacagtcaaaacgattactggagatttcatggtattgctataaatgcttgcttagtt

SEQ ID NO: 40 - DNA, 513 bp, Homo sapiens
  misc_feature (1)...(513): n=a,t,g or c
agtgcagaaagtatctgtattagaattctagagtaagtcaagagctcacattcattaaaataatgacacaactccacnngggtggggagaacagcagtaaagcaaccacatactatactattagactggcaacattgagactgaaaatatccatngaggagaatactgacatcttagnggggnaggcatttccttttaacccggtaattccagtagtaaggatcatacaaatgtaccgctaggaangaggtaacgtatatgatcatcaatgggagaacagtaaaggtgttactgtggaattcccgacaggctttcacttggagggggaatatttgaacacaagtttaaacaacccagggtaagcacacaatgcactatgcnctgaaaggtatacgtttccgccggggtgtttaaacatttccaagttaaaaggntacaccttacccaaagtttcngaaaacctggnttgcaatccgagttccggggggggggttttnggtttttttttaaagc

SEQ ID NO: 41 - DNA, 400 bp, Homo sapiens
tttttttttttttttttccagatcaggaagttttattgctgacatgcaggaagagtccccatgtagtacaaaaatatgtctttatacaaacttttttgtgactttttccgtttctttacaataggacttctctcagtcgtgtgacacccagtgagggctgacccatcctcctctcctttgcttcaccaggaatgtcatcagacacatggcttgaccttggaagggcccagtctgtctgacagggctttgcagacccggcggctattgctttgaaaaggaggagaaagaccacgcacgggcagcagctgggagggacccggtggctggctgagagggggctccgctggcgacgggccctggcaggctttcaggccctcacaggaggacagtcaagggctgg

SEQ ID NO: 42 - DNA, 248 bp, Homo sapiens
tttttttaaccatttctttgtatttttattgatttttcttttttaatttctgcccagttacaacaacgaaatgggaaaccacaattaaaattcacaaaccatggcatgaaaaacaacacgcaccccatcaggaattacaccaaaccccttttcctttttattcattcaaaagagagtccaatacacaagtgtcaaatatgagcactgtcattttttttttcttagaagggggaaaaacatttattttg

SEQ ID NO: 43 - DNA, 435 bp, Homo sapiens
  misc_feature (1)...(435): n=a,t,g or c
ttttcggataaggctgtgctttattacatgcataattacaaatctgtgctaagtgaaaatgtataaagcaatggcgacctgggtttaagccacacagagaaagggctggacaatccattaacccttctgccaatgtccattccattgcttttaacatgattgtttccatttcttacaatttgcatagcacttacttgtcaacttgctttgaattcattgtctcagtttatcctcacaacaaccctgtgaggtaggtagggcaattaacactatccccattttgcagatgggaacactgaggcacagagcggttaagatctcgaggctagttagtagaagcatagggaatagaaatcaggtctcctaactccccagtccacatcttcctttttagactangttgttccgcatgactagggagtagaataaagcgag

SEQ ID NO: 44 - DNA, 453 bp, Homo sapiens
ttcaatataaatgtgtaattttaatatttaatttaaaataaaaccaaggctggattgggttgggaaagaacgtttgatttgcagaagaatataggaatttttttaatcacgacattacaagtcatttgtgaaaacagccttcctcctgccaccggtccctatacaacctgcttaggaaatatggaggtgaatcatcccccttacctcttccctaccagggcttggttctccccaaaatccaaaggagaaataaatgtcttccgttgcctcttcccatttttacagtcagcttctaaccccttgcaaagccctgaatcagagccaagcacctcagaaaatgagggtcccttggttctcttattgaagttgggcacatgtggtcagagaagccccaaggaaggccacagggactgacacctttacttttggaatttgtgcagccagtttgtcagg

SEQ ID NO: 45 - DNA, 457 bp, Homo sapiens
ttttttttcggaatgcaacagaacttttaatcccataaaagactcaatatatttggcaccctcattttatagtactcctttttggtacagaatcattttgccaaaatactcctgtgatacagatgcacatgataaactgtaaaatggaatttcacccattgaagagccccaaaagaacaatatggtagtgcagcatgaactaacatgcaatttctaattttcaatatccccaaattgcaaaatactaatagctaatatatatactatatgccaagtattaagtactttgtaatattatcataatctgttataaccgcactatgaggaaagtagaatagtacaattatctcactttgcagatgaagaagctgaggtatagagatcaatttacacaaaatcatataggctgttaggctctcaagtctagctcttaagagttgataaatgtggagccttt

SEQ ID NO: 46 - DNA, 262 bp, Homo sapiens
ttattgaaaattttattaaaatccttcatttatcttccagatagtagattctattaaccaagttgcataaagagttctgattcccagaggtaagaactgagcctggctttctagttacatgtttactggtaaccccgtctttccctataacacttaagcatatttaaagaatataccctcccctgcctccagccagggattgtaagctcctcaagagcatggctgtgtcttttaacatcaagggctccagggtgaggaagag

SEQ ID NO: 47 - DNA, 435 bp, Homo sapiens
  misc_feature (1)...(435): n=a,t,g or c
ttttttttaccgcaatcaacaagtatttattgataaaaacaaagccatttcaggtgtgacaacagtaacatagttggcaaaaagataaatgggaacatggctctcagataagtcatagcaggcaagggaaggttagaagacagtaggaagantaacatacatatgcataacactttacaaatcatgccacatatatttagcttctttgatcttcacaaaaaccttctgaggtgttattatttcccgttttttaggggaaaaaacggctttaaagatttcaggccngggggcagggggtcaggcctctaattccngcactttngggangcccangtggggtccccctnaccgtccgggggttcttggncccgncttggcccacctngggggaanccccccttttcccctttnaaattcccaaantttgcctggggg

SEQ ID NO: 48 - DNA, 424 bp, Homo sapiens
  misc_feature (1)...(424): n=a,t,g or c
ttttttttttactatcttcaaatttgttttatttcttgttcataattaacagtgcaaagnaattacagcctttaccacttatgcagagataacgaatcaaatttcaaagcataataggtatgttactacctttttacaaaaccatgaaaagcaaaggatttatgcctacactaggtgaagaagccacactgttatatgttatgctaggatgtgtatgccaggggatcaagtgtgctacaaggccaagagcaaagacctgcaattactccaaatgatagccaagtccttcttcgggcatctttatggcatttacctaaattatgcccgaggctctgtggtgtgtgtgtgtgtgcacggtgtncatatatggtttaaggggttcaaaagggatttgggggcccagttgggggttcatttgctaggg

SEQ ID NO: 49 - DNA, 336 bp, Homo sapiens
tttttacaaaccattcattttatttcctgtattgggtttatacaaacttgcaagatacaaatgcagaactcactgggattcttcagtacctaaatctaaaaagaatgctgctgaaagggggaagcaaactctcacctgtttcagtcaggccatccctcctcctggggaggggctcattggctagaaagatgctaaggggatgctacagctgtttgtcccctgacagaggattccatctatctaaccttcacccttcttctaaggccacttttatgctaaataaagacactgaggtaataaatttccttggtacagtttattgtctaatactaggca

SEQ ID NO: 50 - DNA, 342 bp, Homo sapiens
  misc_feature (1)...(342): n=a,t,g or c
tttttttttttgacacaagaacaagaccttttaaaggaacttctctttagtaacatcttcttgtccaatctcaaagttattttgcacagagtaacagaaacaatttaaatgcctaaaagaactagaggaaaaactggagggaaaaagatacatctgcaggttgaagtcttgagccttgtgaaagatgacccaggagccacctcccttccttcgccttccaatgtccacagctggatcaatcagagtcccagaantgggcacaggtgtctttcctgctctgagggtacattctagtgtttcatgaaggggaaccgttctgcaggatgcgtcagggccacgtag

SEQ ID NO: 51 - DNA, 266 bp, Homo sapiens
  misc_feature (1)...(266): n=a,t,g or c
tttttttttttttttttttttcttnaccaagactgtttttatttaaaatatacttggaataggtgaatattaatctaagcattttcctatcacttttaaaattttatactatgtactttgtattaaatagtacagtagtttcagtaagacatgtaaaatttgccattttaaccaccttaangtgtacaattcagngacatttattatatttacaatgttgtgcaaccatcaccactaattcatcaaattttaataatcttttaatt

SEQ ID NO: 52 - DNA, 317 bp, Homo sapiens
  misc_feature (1)...(317): n=a,t,g or c
ttttttttttttgatttctcaaagctattatttattctgtacaaggttccactgtacattagacattcttctactcttgcttacacagtaaacaagtgtacacttgcccttggntncaggttcacaggtcttctctggagaagggtgtcaggccagtaaaactcagggtgtctttctctgatgcctcctcctaggagcctgggaatgtgccaggctccacggggcacaagccgggcccagctgtgtgggtgaacagctttactctccagggacagcacagagttttatccaactntgtagggncaaaattgagccca

SEQ ID NO: 53 - DNA, 414 bp, Homo sapiens
  misc_feature (1)...(414): n=a,t,g or c
ttttttttttccattttaaattattttattgtatattaaaaaaccaaataaagcaataactttaaagacctcacacacacacagtataaacacctgggtaaggttttnttcgtgtccatgttgacaccggaactaccgttaaagtgcaagttttgttttgtgttcctttgtgcagtttcactcacatgtaaacaagtcacttggctatgatttgacccacgcccccccgnttagtttcgggagggcagaggctctaccggctgtcacagcaacccggantcacagncaagntaatgccccgtgggtcctgaccctgcaagcggggcatgacggtttcttgangcctagcagaggntggttaactttcacatncctcccccaccccgtggttcactnttaggtttttgagaagtt

SEQ ID NO: 54 - DNA, 446 bp, Homo sapiens
  misc_feature (1)...(446): n=a,t,g or c
aatgtgaatatnncatatttaatgtagttctggtgatggctacagtcagtagatctaccagcaatttgtccctttttttgtttcagattttaaggcagaaactcaatctcagcagctaatttcatccaattttcttcagaaacattctccaatttagttgagtacgcaagaaaagtgtgtgaacattcactcctgtcctccccacatacatatataggacatacaataaggaaacatacatacatatataccctaggattgtcaatgtatggctgctggaaatgccnggaagggttacttttcactttaaaaataaaatttggtgggattattctgcaggttgggggttgggcccctggccaatttttataaatatgggttgngggggccggccaccagggttttacncggggggctgtcctgggggggttnccccgtnggggttt

SEQ ID NO: 55 - DNA, 349 bp, Homo sapiens
tttatgatttgatttttaataatggctgcatttaataaccagctgtcaaaatgaaaattttacaatcagcttttctaagttggtatgagccagcttagcataccactacattagtataccaaagagagcaagattcaacttttccttttggtgtttgagaatatagataagctattgatgtctgcagcaggaatttaagagactttggactattaagtgaaaagcacgaaaatcctttgagcatgccagggaataacttgcagcttgttttgcttaaattgaaatatatctacatatagcaatgatcatggggcttttacaatttcaacctatttttacaaacttcaat

SEQ ID NO: 56 - DNA, 333 bp, Homo sapiens
  misc_feature (1)...(333): n=a,t,g or c
aaatttaatattgaaaaagtgatctggaagccctgtgaatttttaccctacacattttggaggacatcacatgggttaaagaaaacaccacaaaatctcatttgttcagataatcatttgaatgtttacatacatttttggttatttatttataactaatttaatttacatttcctcatattaacatatcctcttatttagtatgtaatcaaattatgtcagtgagaaaaatcctcatagtacccttgagttgctgattctngagaaaacactnaaaccatggaccatgtaccaaaagaggcattttgaattaaaccagccatgtgccatttt

SEQ ID NO: 57 - DNA, 235 bp, Homo sapiens
  misc_feature (1)...(235): n=a,t,g or c
ttttcagtatcttaaataaactgtttattcagaaggaacaattaaagaaagcaactatgatatggattacaaaaacaaacaagcatagatcctctccaggctccagggtgagacggccccacgctgcaaagactgccagccctgggggatcgcatcagtgggctagcatgtgtgtgtgagcgccgacacgtgcnacacacaagcacacacacgcacacccgccacccacagggtt

SEQ ID NO: 58 - DNA, 368 bp, Homo sapiens
  misc_feature (1)...(368): n=a,t,g or c
ttgtcaatgtaatttatataacnttttatttttatataatttcacatgtacagaaaaatatccatatacctttacccaaatagctaccaccaagaaatctctgttgtaacatttcaatcgccattccctctgaaataataacaaagcactttatttgagtattctgtattccccaaagctaactgtgaaagacctacatcacctcaaaaccttccatttggttccatagatcctgccatgtcacattcttgtaaccagctgcaggggcatcttgntataactggntcatgtcctgctaaagntgaggngggtgaagggctaaaaancacagtcctgggncagattcccggggggaacccggntacagg

SEQ ID NO: 59 - DNA, 448 bp, Homo sapiens
  misc_feature (1)...(448): n=a,t,g or c
agcaggancaagtttaataaacgtttattgagcagtagaatacaagtgagtnccngganccngatcaccaagtcctgtacaactgaggtaattatttcacaatgatgggtggctcagtgagattctgattgcatgcgctgcatgacaaattatctactcagagtatgcctgacacgccggagggctngagggggaacacactgaaagcagtaccagggagcagtgcatctcacaganccatttnttcatgccatgaagtaaacggtacttatacaagtgtacagtgacgttccacgntccccatctaacacggnttgctggaantttacaggcagactgacgttttctttcacatgtactccaagtaaatctggttagtgatgaccngggggcaggcgctgaagcttttcaaagccttacttcttttatcagcagcccggntttttat

SEQ ID NO: 60 - DNA, 287 bp, Homo sapiens
taacatttattgcttcttttggggttagcaagttgtaagcctcattagatgcatacactaagaaatggaattgattagactcgaccgtaggaatggatcaaactatgtactcttcttgttccaagtttcctccaaaagtagtagttattttgtttttcttcatccttgtacagatacatttagtagagcttaccacatagccttcccctaacaaattcccaaagacgtcccacagcccccttatggtaatgagggtccaatcaatgatcaattaggccatgctaggt

SEQ ID NO: 61 - DNA, 483 bp, Homo sapiens
ttttttttttttagattaagttatgaaatttatttatattttaccttttaaaagccagaacataacaaatctcactttctggaaagtcatcttattagaaatacaagaagtgcacttaatacaaggaagtaagtttctcggtgccaccagtgaggtggacatacactcacatcagtccctcaaacgaaggtttcgccagatttccctccagacttctgagatgatctgaattcaggaaggtctgagtgaacttcttccagaaattacagtgaacaagctgaccttaacttttgggtcctcccgagaaatactaatgaaaaaactatttttttccagtgggccctgtgtttgctgggcttctcggcatctggcagctcttcaccggcaggcgcggacccccacagcagcagtgtacaagcgcgaggtagcacttgcagccccatcagagacatatgacatcaaaaaaccaaccttaaacccatt

SEQ ID NO: 62 - DNA, 329 bp, Homo sapiens
  misc_feature (1)...(329): n=a,t,g or c
gccacctctgggcctctctttattgagggcactgggccaggtcttccttcagggcccacagcgcccataaaacccaagggagaatagaagagaccccctgatacacgcacactcgaggggcgcctcccatccgctcccacaacacacaggacagaagcccctctggncnggcagggaaggccagcctcaatccttcttgctcccgtgccgctgactgtgaaacttgtggtgcacaaccctcagggtggtgaagaaattgccgaggaaaaggaggaggaagggaaagccnacataagcacctgccggagaaataggggtgaagggctgga

SEQ ID NO: 63 - DNA, 211 bp, Homo sapiens
  misc_feature (1)...(211): n=a,t,g or c
caggacagattggcctttatactaaanttccacaatatacctggtattagtacagcctgaatccggggctggtcacagaaggaaaaaggttgtagtccctgaaaacagagtgttacaaggacatacacactacagatgtctccacggtgggatctngccacacactcggctgggcaaaatgagggcctggctggcaggtgctaatatattt

SEQ ID NO: 64 - DNA, 398 bp, Homo sapiens
caaagtttacaataatttattattgttgcatgacatttgccagtaaaataaattatagaaactatagagtctttataaactattttgtatatcatattcacttcctaatgcttactgcagtaactgtatgaaatttaattagattacgttttagcattagtcagaagatttaaaaaatatgtaaaatgttttcacagtactttggatttataaaagaccccattattttaacttttgtgcaacctgtttgaaatgtataaaaaaccttttacaaaccaaaaggtggcgtaaggttttactgagttgctgaagacatcttactttcttgaatttctacttaaacatccatgtggtgcactttttcaggcagtgtaataagtggcaaataaataatcaat

SEQ ID NO: 65 - DNA, 436 bp, Homo sapiens
cagtagaaactgtacttcaaatattgaatttttattcaaaattctttataactttattacaatatagattttgtgttggatagttttgcccactgtaggctaatgtaagtgttctgagcatgtttaaggcaggctaggctaagctatgatgtttggtaggttaggtatattaaatacatttttgacttatgatcatattttcaacttatgatcatattttcaacttatgatcgggtttatcaggatgcaaacccatcacataaatggaggggtgtctataaaacattgttagacctataattttgctgttgattattcgggaggtggtatggcacagtggttaggggcagaggccttggagttggactacatgggttcaaatcccagcttggctgttttctgtgcagttctaatccagttctgccacaacctggtt

SEQ ID NO: 66 - DNA, 444 bp, Homo sapiens
  misc_feature (1)...(444): n=a,t,g or c
tcactgtgatgaaatcactttaatgtccttgccaaggaaatgcccaagacactggcaggtgggcaagtaagtgtccagatgggaccccgcagctctgtctccactcagcagtgtccgcacgccccaggccagcaggcgncccctcctcgggcaacactggtcttcctgagggcagcccgtgctggggtcccacgcttcgtccatagtgcttgtggggtctctagaactcagtcatcttcttgtgggtgtctgccttcctctgctcctgctgcaggccggcttcctgagcccggagctgccccagctggcgctgggctcctgccagcttctcctgcagctgggctgacgccacgctatgccggccagcgttgcgngcgagactcctggatgctcctgatgtcccgctgggttcgctcgatcttctcctcagtctggaagagccgc

SEQ ID NO: 67 - DNA, 598 bp, Homo sapiens
  misc_feature (1)...(598): n=a,t,g or c
cacagcaaacggangnanggcctgtatttcacacctgctcactcactccatggcttagaaaagaacacgtccaccgcggaggccgcaatgcccacctagagcaggtcgtagaagtagtccaggccctggccagctcccagatagagaccccaacgcccagctcccgggccagctccagccgcacctgcagggacttcagggttgggtagaagacgacgtgcctcccactgcggctcttcttgtactcgaagaagtgctctgagacctggctgtcccacaccatccggggcctgtggtccttcagtgtctggatgtacctggccccgacaacaggctcacgggcatccttggaggtcgcgtagtccataccataagaagtttgagccccaggaggattttgcttcgccactttggacttcgggtccaggacctggacgcaggctcgaacccaggacaggggtgcattagggccaggctgatgcgctgtagagtaatcgtaggtcatgaagctgaaaccatccagnaggggggcagttntcaaatcctttgtggtgaaaatgccanttggtcggtcccggggtgattgnagcggaatnac

SEQ ID NO: 68 - DNA, 448 bp, Homo sapiens
ttattgattaattgagtgattttagtcaagtgaatattgatacatggctcgaaaaagcatgaaaataaaatgaacacgtacgggaattactattaacataagcgataacatcaaaacatctggtaaaatgcagttaaaaaaacaacacaaatgaaatcggaatgtaaaacattttcacagtattcaaagcttttgtaagagacttaggatctaaaagaggagtactacaggaagaaactagaggaaacgggaatttcatccatgtcctgtgtatctgctggcaacaggtcagaacggccagtatgttattccctgcaggctgcctagggtgctctcctcaaacagatcacctgagcctcctgcatctatgaagttatgacacagcaaccagttactcagagtctgatgagaaaaacagattttaggtttgggaaatgggattactgta

SEQ ID NO: 69 - DNA, 416 bp, Homo sapiens
cctataacatgattgccttttatttattatgcaggttgttgatttacatagggagttggagatgctaaccaagcatggagttttcacatggtctatttctgctgagttcagggacttggagacagcctttaacttctggcaaaaagacaatttcacaaaggtgtttaaaaccatcctttggtttttgatcctgagtcagagacggacatgtgcttatgaaagaaggtagagtttcaacccttaggtaaccttaaaagagcaggaactatgttgtgtgtaagtcatgtgcagtatacaaacttgatattaaatgacaaattggaacaatctttctctaggaatgcctctctttccatagaggcatcacagtgaagtctcttaaagccttgatctaggttgtgttacagattggggct

SEQ ID NO: 70 - DNA, 415 bp, Homo sapiens
  misc_feature (1)...(415): n=a,t,g or c
gctgattacaatttattatttcttttcatccaccatccactcctcaaattatacgccctgacctgcccaacactgtcttatgttcaggattggcatcacagaggtacacagttccactggttccagcttctgggaatcgggaacatcgttgcagtgtgtaactcattttttgcatagcttcattgctgtagtctacatgagaatagacaggaaacccaagtttgcccaatttctgggcgtgggaatagatgacatacgtcacaaggccatggagccggttattccngaacggtgcctgccattctcatctctccagtctggtccattagatcccagcacacaggggtcccctcaggccccaggagacagcaggtgggaaaggtctgaatgcagcgctcaatgaatctctggctcc

SEQ ID NO: 71 - DNA, 418 bp, Homo sapiens
gacatgaaacagtgttatagtttataaggttttaaaaggaggaaataaaataggatatatggttttattttcattaaaaaaaaatatatatctgtttaaaggcacagaaaaaagttcagaggtatacttacaccaaggcattaaaagtggttatttggggcatcagaattttggttgatttaaatttcttttctgcttattttgtattttcatatgacatgaggaatgttaatatgcataacatgtactcctcacaaaagagtagtaaagctaaaaagagaaagcagtgccaggtagacaaaatgtctctttcaacactggctgaccctggatattatactggtaacaagatgatagactctgtgttctaccatgttcctgctgtgacagctgcatggcataaagagacagagatgct

SEQ ID NO: 72 - DNA, 410 bp, Homo sapiens
tcaaaagtctaaaagtttattgccagaatagcaaacttcataaagacaccttaaagtacatcgaatatgacaagcaaaataaacagaaaactttgaccaaagaaaagattgccgctgtcatgcacagtcaaattaataccaaaccaaacaagtacatcgaagagtatatgggttatacaatccacactctgaaactaaaggagactcattccaaaatgcttggttttgggttgggggtttgagaggggggctggtgctgggagggtaattttctcctaatacagaatatggaaatatttagatgagaagcagaatgactaaaatatcagtgatccatttaatttttatctccaagaatagaaaactgtattataggcttccaaaattaaagaattgatccaaaaatcgaa

SEQ ID NO: 73 - DNA, 231 bp, Homo sapiens
agtttgtatgatttatttatgttaaaaaatccacacatgatgctggggtttcaatggctttgtttaagtgatagtttttcctttttagtgaaagttggagcgatgataaacagctccagctgtaaaaatgaaaggcggaggtgaagctgaggtgattattacagaaaaatgctgagtggggaggggtatttggcccttccatcctctaaaatgaaaattaccctctgccac

SEQ ID NO: 74 - DNA, 307 bp, Homo sapiens
  misc_feature (1)...(307): n=a,t,g or c
gacacttccttaaatacatgtttattttacttcaatatcgctcagggttgtatgtatttgaatacttcagtactattttgaacattctaaatatgaaataccataaagcgttcaaatttatcaaacagtggtacaatatggttactaaacttgcaacttaatttacaatgacgttcaattttncctcttcaaataaaatcactgactttggtccatttgatgagaaactaggacatatgccatgacagcatacttctagcactctatgtaataagcaaaagataatttagctaatatagacaggtta

SEQ ID NO: 75 - DNA, 325 bp, Homo sapiens
  misc_feature (1)...(325): n=a,t,g or c
caccttaggcagctttttattttgcatcctttttttcaactttgtcttctattagctgtgcaagaaatacatgtctgctaaagttacacgatcttcgcacaacagcaacctacacattagtctacaaaggggaacaaacccaanttcctcagaagtctgagtccactgttgccttctttctggccatctggcagttacaatatagcacagaatgactatgcaagttaaatattcatcttagacatggacatttgctttgggactcctaaagtggagtcaaatttgatctctacagaaactctacaatgtagcagagcactgtgcg

SEQ ID NO: 76 - DNA, 507 bp, Homo sapiens
  misc_feature (1)...(507): n=a,t,g or c
ccaagccaaactatatctagctttattaaagttactttccataaacaatcagggtatttcaggcaggacatgggcagataatcgttaacggtgtacaacaactttcaaactcccttcttcaatggactagcaaaatcggaaagccactataaaacccagtgaggtcttcatnttatgccctgaacagggagagtttagagtgagggttgacatttcaactttagcatattgtttaacagcttttcatgaactgaccctgacttccaggaaatgaaataaaaatggcagaatttatctgaaaatctgaaaatccacaatctaagaaatnggaaactctactctttttcggggggctccatctcantggcaccactgggaaattnttggttngcctggacacactggtaaccaattactgggagggtcaggggcccancaggagttttgggttttaangggagttaaagtcnaatgtttggaaggatgaccangggtaaaagagggacc

SEQ ID NO: 77 - DNA, 320 bp, Homo sapiens
tttacctttctgaagaaaaaactttttatgacttcaatgacatgttatttttaagcagcagcggaagtcttaaacacctttacatgcttcgaaatactgttgatgatctgattttcaatactgtattgggtgccattaaagagaccattgttctttgaatcagtctctgtgttgctgtgggaaacacggtaaggcagaagcactagaatcatggaggcaaattactgaaacactgtgatactgaaatactgctggattctggaataatcttctgacatgtggaattagacatctgaagtgtcgctccaatcagtcacagt

SEQ ID NO: 78 - DNA, 390 bp, Homo sapiens
gagacttgtggttttatttatttctgacaatgttacttagctcttctttccatgtgttgggttaaggcagaacgaaatacttctactgcaaaatcaacttctggtttagtgatgcacattgagggcgcaatggaaatgtctgagaaaaaatgctgcctctgccaacgaggagtcccatgtgcttgcagtcctcatggatctgatttacttcttcacggggaagaggccgacagcttatcttatcctgcaccatttctatgcctatcatgaggcctttgcctcgggacggtctccaacaatttcaaattcatcccggcagcttagcaaacttttagtaaacatgtaaggtcccaaacttccttggactggtttttcccggtaagaattttc

SEQ ID NO: 79 - DNA, 465 bp, Homo sapiens
  misc_feature (1)...(465): n=a,t,g or c
ggaccggggcacgctttaatcgggagggctggagcagagggcggccccnganggngtngtgtcagtgtgggcggcttgnggggccgagtccgctggtgggctgnacccaaggggagcagccagtagggaagttgggcgagttccagaatcagggggcgtggctgtgtggctgtggcctccgtggggtgggcggggcttacatgccgggcaccaccccattggtctccatgttggtgaaggttaccccgcaagttctgctcctcctcgaaagccttgaacagtgagttgaagttgccggctccaaaaccctnggtggttgttggcgctggatgacttccaggaagagcgtgggccggtcctgcaccggtttgggtgaagatctgcaggaggtagcctttctcgtcgtagtccaccaggattttcagctcctccaagggcatcaatgttctccttcaacttgatctt

SEQ ID NO: 80 - DNA, 456 bp, Homo sapiens
cgatgagcaaactgaactttaatttgcttacctgaaaggcttgctcttcattattggcataggccacagctatttacacagaatcattgtacaggatttacagcaagatgctacacatagcatcattctggataagcgacaaaggagtaagaacagactggggaataaagctctgaaatcaaagtgtaagcagaaatctgaaggtaggtgtacaaggaaggataagggccaaatgatgagcgaggttggtgaggtagacataagggaggaagaggaaacatccaacaacttgtggtgcagagatataagggaagagtccactggcacatagtcttaaaaattatgtttggagtttgaaggaggaaaaatctgccataagccacctctgtgagaaaaaagaaggcagttagaaccttacaggccaaaccttatacctcccctatcaaaaagtaattc

SEQ ID NO: 81 - DNA, 444 bp, Homo sapiens
  misc_feature (1)...(444): n=a,t,g or c
ttaaaaatactcctttttgtaagtctttattttttagttgctcctcccatagtaatgcactgaaaggcataacagtttatattgtacaaagcatttgaagaaagtacctcaacttgctgattatttcaaaatgagattacaaacaaaaagaaaacaaatctggttcctcaataaagggcaaaataactgaatacagtctgttatttacttctctcttttaacataaggttgggaacacttcattttacaaataggattaacatgaacataacatcgcacaagcttgcagacaaccagcataaaatatggagtacagtttttaatcagaagaatcatgcttccatgaaagaaattataatcgtttatacaattgaatcgatttcagtattacaaaaactaagttgcatctattcgtatttagttcattaagaaggaaaacnaaac

SEQ ID NO: 82 - DNA, 429 bp, Homo sapiens
aacaagggggcagtcatttaatgcagaaatccagttaacataaagagacagaggttgaacaacaggtcttcaaacaatactgcatagtgtcacgagttagctcttaagcacgtttgatctgtttatcttatgatttcgattccagtacaaagacagagaagagacttaaaaaaaaaaaaacaataaggcaacagaagaagaatcttcctgtgacaaggaacgtccacaaataatgcacaaatatttggtgctgacacaataagacaccatcaggacaagttctgaagatgctgcattaaaatttaacaagcatgatacaatgacaagaaaattatactcgctttgttacgaatccttttggcaagtagaaatgactctcgggtaattgttacatacaaactttctgaaataaatggaaatcatacaaat

SEQ ID NO: 83 - DNA, 306 bp, Homo sapiens
  misc_feature (1)...(306): n=a,t,g or c
acaaatatttattaatttattttaacctaaattacatgttaacataaatatttttatgaactatatttccccaaacaaaaacagttagcaaagtggtattgttttacattttgcattttaacaggagacaggtgggttcttatatttgcttccgttgtgatactgcatgtcatgtagcctctggaaaactctactgtacacctctattttttcagggctttacgtgctaggtgtggtttcttcctctgcatcgaaccagcgacctgggtgcctccccacccaagacggacctccacatcngggaac

SEQ ID NO: 84 - DNA, 470 bp, Homo sapiens
  misc_feature (1)...(470): n=a,t,g or c
ttgactatccacatttctttaatgtaagtcaaagcccatcacaatgcatcctgttacaatggaaatcttatttttggaagtccacttaattattttgagcaacattatatacaacccaacagatacaattaattgacaacttgttgaaatgttagagctaaaccacaaagagtaactgagtaatgttgacaaccccaatatttattctcatactgtgctcaacattagatgatctataaaattcaactggcaaagggagatcaaagaattgtgcttcatcttgagcttgaattggatgacaaggagattaggaaatcctaagtggaaaantattcaaatcattgtgctttccatatatttttcttaccacctatttccagttataaaccttacatctgtgcctctggcataccatttaagtacaatactaaacattctttaaaatcntttttcnactaactnttaaaagg

SEQ ID NO: 85 - DNA, 469 bp, Homo sapiens
  misc_feature (1)...(469): n=a,t,g or c
ttatggcttataggagcttataactttattcagatagcatcaatcagggatgaccagaacacattaggaccccagattattcaaaaactttaacgaattttaaggggaagaattttatcttttcccttaaaatgcagtcatagaaattagaggatgactcactgccacagtgtctaaaagcatttgctagcaaagaggcaggacactaatttgtaaactgctcaactgttctgactggaagggaggcctggagctctgctatcaccaatccttcccttccctctactccacatccttctaaggagcatgatttgaaaactactttcctaggttaatgggcatgtgcatcaatggagagaatagtataagcaagtgagatgtagactaagcaaaatttaagatggagaagcacattttaaaaaattaataacttaaaagtctcaagttattaattttttttttgctaacn

SEQ ID NO: 86 - DNA, 471 bp, Homo sapiens
tttttaacactgaaaatgtgtttttaattgttatttacagttaatcagtgataccagtgtttagcttaatccagccaattgccagtcttgactccttctttcaacatctgttattaagatcttccttataaatacttagacaaattaatttagtgaaggagagcgatctgtggtccagagtaactcaatgtatggccatttggtttgcagacagcgtttaataggagtgtcatctgtctgtagcatgggatcttcaaaacccatcacaactgcagtcccttctacgtacatgaccttttcattataatttgactgcttcaatccattgtagtggtagacagtaaaagattctggaccactggagccctgatcaggaaaaaattcttgaagaaatgggcccaataatatgattcctaatccttctggatctaatttattcctcatgagatttatatattcaggatctgaaac

SEQ ID NO: 87 - DNA, 457 bp, Homo sapiens
  misc_feature (1)...(457): n=a,t,g or c
taaaaattttttttaatctcagaatctactaatgtgacagacaaacggtatgcttaacagagtcataaatactgtgtataattgcttgaccatttctggcatttaaatgacctcccagaatattacacaagccctgagactagtgagcatcttactactgaccttgtacaataccaaagcttcataatgctaaagaaaaccaaaacaaaagacaatggtttacacagggaaataaccctaaggcaatatgaaaacagtcataatttattactgataaagagtaaaggcatccttcccatagagggggggaattcacagggaacactaattatatcagatgaaccacggggatagaaaataggcccatttttaaaattcattgagaaattattactttttctccacaactggtgattcnataccaaatnttaaaccctgcnaacccttatgtgctacc

SEQ ID NO: 88 - DNA, 452 bp, Homo sapiens
tttggttataaaagattttaatatcaaataaaatgtacatgatcaaaaggctttgattgccatgtaaagcatagtttccaggttacatcaagtgattttatcttctcccatttcaaatgaaatgttgaaagcacaaacaatctgccatgaatgataagaagcaaaggcagcacatatcatctgcaagtttcttcccaagctataaaatatcatgttcatatttttcctgtttgtgatcccaaaacaggcaatattttcatttcatccactctattcttatgtatttgaaaagcaggtgttatccacctaccacaagagcactgttcaccataccagttgaaggaacccaacttggcactgcattttgggcaaagaagctgtccatccatcactcccaacaaagcagattccatccactgtacaggttcaatgaaataagatgtacattgagg

SEQ ID NO: 89 - DNA, 410 bp, Homo sapiens
  misc_feature (1)...(410): n=a,t,g or c
tttacatttcctgttttcattttattgggaacttcaaagaaaagaaagagagacggattggttcccaagacaagccgtgacgtagactcccaacaagctggggaattctggacagcnaaggggtggacagtgagactcagcacagcccaaagtcaaaggcattagggttgttctgaaaatagagattcaagaagccctggaaaatgctcttatccatgagaagagcacagactgtggggtcccacttcatggctgatatccagagccgcaggctgtgcgtgtggctcacacagtccagtatcccatacacatccagccgctcaaaccagggccagaggaggtaatcaatcatggatatacaggttccaccaaagaaggtggtgttctgatactcaagaatctcttccagg

SEQ ID NO: 90 - DNA, 393 bp, Homo sapiens
cgtttttccaataaatatttatttccaataaatactacatgactatcttacatgtagtcactattcaaaggactggggtaaagacaacaaaattcctagtctcagagcttccactctagtgaaagaatgtgaaagttatcagtattcagatggagtttaaagccaataggcagtattttgagtgatgctatagagtgcaaatttgtcaagatagcatggaagcccatggttttatttatttttttgagacagggtctcactctgttgcctaggcaggagtgcagtggcatgctcacagcaacctccgcctcccgggttgaagcgattctcctgcctccgcctcctgagtagcagggattacaggtgcactctaccacgcctggctaatttttg

SEQ ID NO: 91 - DNA, 472 bp, Homo sapiens
  misc_feature (1)...(472): n=a,t,g or c
ttttttcaggacacagtgcactttaatgacatacagcatttaaaatccttcagacaaaggtctgaaaacagtcttttaatgcaagcctaaatcttcaagcacataaaatctttcttttttaagcttaatttcaacatcactggaagaaatacctatcgttaaaccctgatnngcattcttaaccacttgcagccagtgttcatgaggcaaaacgtgacccagagactttgttcaagttctcctcctagggcgtctacattcacggcggtcactccgtttctgtctccttttgtttggcacctgctggtgtgaggatcagggcttgcagaatgtccgacagggaaataatacccacaatactatctgcttcatttaccaccaccaagccgatggaccctcagctcttactattctggtccaggatggtctccaggaatttccagcttattggcacttnaaaaaacntttcaaa

SEQ ID NO: 92 - DNA, 207 bp, Homo sapiens
  misc_feature (1)...(207): n=a,t,g or c
tttagaggaaacaactatttaagctttattttcaaagtctaattttaattcagactgaacaaacaagcagaaaagtgagaaagctaactgtattagcagacacagatgtaccaaatgtaaaacagtgggttattaacagaactatttacatgcatatttacaagcaatccttttgtaccnagtttttaggttagccgggaaaagatt

SEQ ID NO: 93 - DNA, 255 bp, Homo sapiens
taggttcaagttactcaacaattttatttacccattctacacacacgcacacaaaaacacatttcaaatacagttatgcacactttaaatggatctgagtggcatactttgttatcagtgtcacccgattaaatcagaatgttgctaaagacttatgttcctatttcaacagagcagtgcctaggaaatctacagtagaactctcttcctaggcttcccaatctgacccattcccattcaacccagaggtgctca

SEQ ID NO: 94 - DNA, 139 bp, Homo sapiens
tcaacaaatatttattgttcatcaaagacgagccagattttatgggcatttgtgatggaggctggccttagctttaggagaaggaactccaagagcagtagtgatctctgagatcaccttgttcaccctcctcggggca

SEQ ID NO: 95 - DNA, 271 bp, Homo sapiens
aactatgtgttttgaaaactactgccttctcagcccgaaaatcgccgtctctctcaggctcactgtggtttcctttttctgacacaaaggcaggcacaggctgcccctccacatgtcttggggatcagatcatgccccgggctcataggaaccgaaactttggggcatctgagactggctgattcagattcaaagacaatcacacggaaagactgtgggcagagaaggcaatgcctctcccctggtccgctttgctgtcactattacataa

SEQ ID NO: 96 - DNA, 194 bp, Homo sapiens
tactttttatttttattttgtgggcttttaacataaaaatacagatgctcccgtcagagtaaggcatcgcaaccttcagttcttccgcagcaccgggagtcgagggggaggcatggagcgcgggaaaaggaatcgagcgagggaaagggatggagcgtgcggcgcccccaccacctcggagccagcggagggcg

SEQ ID NO: 97 - DNA, 212 bp, Homo sapiens
gcagtatattaaatttaatcagagattacacagagtatgacataaaacagcagttgactagaataatttgcaacacatgaaaacagtttagaaaatggatttaggtcatattctctgacagtaagtttgttggaaatacaggcatagaatcagacagatttatgtgtcatctggtgctcccttcccttgtcacatcaacttgaaccgatagt

SEQ ID NO: 98 - DNA, 409 bp, Homo sapiens
  misc_feature (1)...(409): n=a,t,g or c
agtctagatgaatttattgccattcacatatttcatagaaaaaaagatgtagcaaacgggtcagggttgtacaaaaaaaaaaaaaaatccaggtttatataggttgctctatttacatctgagagcacagctgtcctggcatcaggcacagcagctgcacttgtctgacgtccctttgcagatgcagccctgggcacacttggcacagcccacaggnangcanggagcagcagctcttcttgcaggaggtgcatttgcactctttgcatttgcaggagccggcacaggcacaggagccaacaggcgangcaggagcagttggggtccatttcgaggcaaggagaagcaggagttcccgattcaagaggaaaacacgcagcgggacagattctcgtgccgaattcttggc

SEQ ID NO: 99 - DNA, 307 bp, Homo sapiens
tttagagttagaacatcaagactgatctttatttcacccagaggcagagtgataaaatggcattcttctctatttaaattctatcccatctttcttcttgtccttcctctcaaggttgctggcagaggtggttggggctatgtgcctggagtgaagattctgcccattggtcaagagacctccctctcagatgctggctctgcccctgcctttgggggtcgacccttgtactcgcaggaccttaggtgactagttgtttcttcttttatttcccctattcgtgatgatcggaaaggtgaaaaacctg

SEQ ID NO: 100 - DNA, 437 bp, Homo sapiens
tttctttgttaggctgttttaaacgtcttagcaggatgtggacccaggtggctaacggccaatttggcgacgcaaattcttctcaccacagtgggttcagagaatgaggagagggctgggaggtgggctcagggactctgcatgttgctgaagggtgaaagagctggaatgctggctcatctggccccatcaactcccaaccaaatttgtgtgtccttaggcaaagccaccccctgtctgaagctcagttttcctgtctgtaaaatggagaaaccagacactgtccacacaaggtgaaggggcatccaagaatgtgggaggatttaacagcattgtagctgtgggctgcactttgggaaagttcaaagggctcctcgaatgccagggaagtctagaatagtgacgggttccggctgcccaagtttgttctccaacct

SEQ ID NO: 101 - DNA, 428 bp, Homo sapiens
tttaaagtggcacatatttattatctcattttctgtgggttaggagactggacatggtttagctgggttctctgcttcagggtcttataaaggtgcaacaaaggtgtcagctggggctgcaatctcattggaggctcagctggggaaggatctgcttctaagctcatgtggtgttgacagcattcagttacttgtgtgttattggattgagggcctcggtttcttcctggattttggctggaggcatcctcagttcttgccatgtggaccttcccaacgtggccacttgcatccttgtcatccagaagcaggagctggttcaagacttggtgctggttgctacagtaggtaggagtgtggccgtggagagagagacagggcagagactgtccccagagtaacactgctgaaacatcctcagtgagagt

SEQ ID NO: 102 - DNA, 298 bp, Homo sapiens
tttttggagactgaaacaaaccatgctttatctgtgtactttgagaaaatccatccacaagaaaggagccaagcgtcagtttccaatggggggaacattctcatggaggtactgtaaggctaagtctgtccacttcatttcttgttctttgacagattctgtggtgccaccattgtcttgttcaggttcaggaagctcattcagtggtattgcgacatcctcataaggcagcttgtcttctcgccaagcatcatcaatcaaatccaagatccttccatctctctgaacctcactgtcc

SEQ ID NO: 103 - DNA, 423 bp, Homo sapiens
tttggtggggaatgcaggatccacttttttattgcaggaagactatgtctagagcgaaggctacacagaccccatgatgggggagtgggggcacccacatgcggggggagagggggcaggggcggagtcacagcaagcatggcctggcacagtccccggcaccagggatgcccaggcaggatgggccagcagccaggacaggctcgggccccctcctattgcagatgccctctctccccagggtcgggcagggcctgaggtgggagaggcctggaggtgggcagggcccaagggagattgtgctatcagggtgtgtccctgagaaagggccgcagacccctgcccagcctcactctctccggcaccttcagaacccagaagctactgccaggacaggagaggaggcaacatcagctgctggtg

SEQ ID NO: 104 - DNA, 509 bp, Homo sapiens
tttttcttttttcttttttttttctttttttccctgtttttcctcttggccccagccctgagtgggaaatcattcaaccacccatcttttggtccatctgtccatccactatgtcagcaggtccagcccccagcgcctggtcacatgactgtctcccactcttcctgtagcagggcaggtggccgctcaggcccagaggcatcctcgtccaggcctgagcaggagccgttgaggaacccatcgtccttgggagcagccatggcaggtggtgtggtctcgagggtctccagggctggggtccctggcttggcatggccaggcagctgagggtggccgttggtggtggcagtgggcagtaggcgggggctgaggggcaggccgagtcccacacgggggccgacattggtcacacttgtgtgggacaccatggggccgtagctatagctgctgctccccctgcgtgcctttcgcttgaagtccagttgcagtgttcagcgggtcccaaattt

SEQ ID NO: 105 - DNA, 271 bp, Homo sapiens
tcacatgatagttttaatatttatttagcagaggggtaaattgaaacatcagttctctagaccagtcaggaaatgtatgctttgtgctttataagcttacattcaacatagatgacataagttaccatactcaaatgtaagatagggagaggtagaagaaatagctgagaacttgaaaagatgtactgttattgtcaacaaaccaatgtcttctcccttcataaaattgtgtttagggaatattaacaattaagcttgtatacaatagtaa

SEQ ID NO: 106 - DNA, 468 bp, Homo sapiens
  misc_feature (1)...(468): n=a,t,g or c
gatnaataatnntgattttagtcaagtgaatattgatacatggctgaaaaagcatgaaaataaaatgaacacatacggganttactattaacataagcgataacatcaaaacatctggtaaaatgcagttaaaaaaacaacacaantgaantggantgtaaaacattttcacagtnttcaaagcttttgtaagagacttaggttctaaaagaggagtactacaggangaaactagaggaaacgggattttcatccatgtcctgtgtatctgctgggcaacaggtcagaacggccagtatgttattccctgcaggctgcctaggggtgctctcctcaaacagttcacctgaggcctcctgcatctntggaaggttatggacacaggcaaccagttactcaggagtnttgatggggaaaaacnggtttttagggtttggggtttggggtttacncgtaattnacacntcc

SEQ ID NO: 107 - DNA, 346 bp, Homo sapiens
  misc_feature (1)...(346): n=a,t,g or c
nttttttttttttttcagttgcagttgaactttattcatccgttcacacctgggtccctcccggcccccacctaccctggccctgcctactcagggcttccaanattgggtgtcggggtggctttgcttatcctccanatgccttcttcccagtatngtgatccgtgccctccaggatctaagggatgaggactaaaggggtctgttcctcctccaggcagctggcatggaaccgtccgtctcagcggctgcttggtggtggcggtgtggatgggtgtggctctctgtttgctggggggtattctgccaggatgtataggaagccacccagggctgcnactgctgt

SEQ ID NO: 108 - DNA, 470 bp, Homo sapiens
  misc_feature (1)...(470): n=a,t,g or c
caggtntatnttntttaattatcactcacatatttcacaggaaaaggantntagcaaatgggtcaaggtggtntaaaaaaaaaatccaggtttntacatgtctctctgtttacatctgggagaaaggttntcctggcatcagtcgcagcagctgcacttctctgacgcccctttgcaaacacagccctgggcacacttgctacagcccacggggaggcaggagcagcagctnttnttgcaggagggtgcatttgcnctctttgcacttgcagggaaccagcgcagggtgcagggagacaccagcgggcgcagggagcagttggggggncccattgcaagcccgagggagagactgggacttttcccaaggagagaagcgaaggaagccagtggggggcagctcgtgcccganttccttcagccccggggggntccccctagttctaggagcggnccccaccgggtgggat

SEQ ID NO: 109 - DNA, 55795 bp, Homo sapiens
  misc_feature (1)...(55795): n=a,t,g or c
gggccctgtcctaaggcacatgcatgtttcaaactctgtgtcatgtttgctactagccaaagaaaaagaccctacctcttgatgggaggaacagcaaagtcacattcaaaggggcacacatacaaggataggaggaattggagcattttttgccatctaccacagggtggtttctctgtctctctcactctaattaccaatggttaaaaattggagcttcatcttatcttgaaaaatcagctagcctactttattcacttacacttcctccctcatctgttggcatttgagttgtgataatgcctaatttacaagattgtttttgtgaagttagatatggaaaaatttgacaaaagcagaaactcaatatatgttttctcctttctgaacaccactagtcatgaagctgctacctgccaatgaccaaggagagcggccaagatgaagaacaagggagtcatagaggaggtggctggagaataatcccttggtctgttttagaagtatagaggcattaggaaacaaaactcttaaagaatttataagaaaactaaacgtactttaagaaattaaaaggagcagtaggaaacatatcagtttgctctaagtgaaatatctcaggctctgaatggttcacccaagaacctgagctcattcctgggaggcacctgcagaaaactggttctggtcctggtccctgtcttcaggtggctgtgtgtaaacatcttaccccagtgtacacatctgcagctggtaaatgcctgggggttttctcactgctctccaggagaatcagcactgccctgttccttcctagcctgagtcaggactgagcagagaatcctccaccacacacagcaggcactatctgccacagttcctttccccgatagcttcaaattttctgccttttgaaataagcctacttttaactggaataaataattggtcaattttcacctcaggtgaagaggaaccaagcctctggaaacacttaggaacaaactgtaaaaaccaaaggcaattgtgtaaccggttaaataagcttgctggactttgtccctgtgtatgagttagacaattctttcagctagtttgagtgacgcactgaccagtgaagcgcagtgaagcagtgggaaccggaatatccaaagagtggtttgaaggagaaagaagcattgtggctttatatcctctgggcctgggtttcctgaagtcaccacacatagaggagagagaaaatggctgagttaaaggtaagaaaccatctgacaagtttgctatggcttcttcagccaaaatttatggaagtttctgagaacttcagggtatcagagttggaaaagacttagagaggccctggttcaaacccctgtgttcagaggcttccctgtggtgtctgtgggcacagctggagctgaagaacaagggaaaggtgataaaggaaagaaatgaagctcttattggtcatcccttgcctttgttcatttcaattattgtcttggaaatctgtagacatcctaagagctcccctccactacggacatgcacgtttctctctatgtctttttcccaacccctgctctgacaccttcccattgctgcagcctcatggaccacttccggtgaccagttagatatgcttgatctatttagttaattaaggctctgaatcagcccttggccagaagaagcacctcctctaggaaatcattccttctttttagtaataccaattgaaaagtatgtgtgggttatgtgctgttaggtgctaagcattttaactatgaattaactcataatcctcaaaataaatctggggtatagagagaggttcttgtttcaattagaaaagtaatgcttggagaaactatgatttgcccaaggtcactgccaatagatgacttgattagaagcagggtatgtttgaatgcgaagtccaggctcaaaaaggggccttagtggctcctactaaactggtatcttaaggcaaggaaaacagaatatgtccctaatatctaaaaccatgcctagtgcccaggccaggcttgaatcaatgctcaatgcatgcatgtgtaantgaacagaactgcccagaaccttggctcaggccaagtaggccagaccaccccacaacagacatcttccctgaatgcagggtttgagaagtgccctaatgccctctaactgatgctgagtttgaagaatccatcagttaaggggaggtgtttctgagtttgaagaatcaaacaccttcctaattggtaggaatcctgaaaacactccacaccggagtaaaagactttggttttttatctttatgcctgactaaaagttaactctcattctttcattcagcaaatattttgtgctagtgcatgacactgcagattaatatcgtagatgaactgagtctgggctaggtagagtcaaaaaaaaatttcctaaaggagcctgtacctaaactgagtcttcagagagaagttggaactggcaaagtgaggaaggacggggtctggagggaagagtgagtgcaaaggcacagcacatacagaatgcctgcatgctctagaatccaaaactgtgtcagccaaatttgagttgatggagggacagccaaactgagatacccaggcggtggttggatttatggatctggatttcaggggagtgggcagggctaggggaataaaactgagggtcatgatgtcagtggtaggagttgaagtcttggaagaaagagtagatagaaactttgttttctgatgaacattctatgaagaagttcagcagaagttggaaacatctttaccatttataaataaattttatgtaaatcctatcctgctgtcatgtttaagcaacttattatgcccagcaccaggacatcaatgttaattgcatgccagtctttgctctcagtttcaaaggcattcttccctgcctgctgtctaatctttacaaagaaaggttaactccagaggtcaggaatctgaacacagaaaaccagattgcatcatattcattctaatcaataaacattatataatttttaaaactgtttctcatcttttatttcttcattttaatgaatatgtcaacacaaagccgtaaatgaaatcacatttacacaaaagtacaactggggtaagaaaattcaaaagataaagtaataaaattaaatttaaaatgaaataccctatgtatttgagtaagttgcttagcttctcccaaccttggtttcctcatttctaaaacgaagaacttgcttaatattcaggctctgggccccaccaccaaatccttgattcactggctctgggtctgtatgtaacaagcttctggagtgattctaatgattagccagagacaggacctaccattctacgtaactgatttcctcttgctgctgtaaaaaattaccacaaatttattggcttaaaacaacacaaatgtattatcttgaagttgtggaggtcagaagtctgaaatcggtttcactgggctaaagtcgaggtgtcagtgtggctgtttcttctggagactctatgagagattgtgttttcctgccttttccatggattctgtttcctcttctagaggctacccacattccttggtttgtagcctcttcctcgatcttcaaaaaaatgtatctctgcttttgtaatcacgtcacattttctcctcttataagtcaaatctccctttgcctccctcttataatgacacttgtgattacatttaggatacacccaaataattaggatatctccccatcccaagatccttaattatatatgcaaaagtctgtttggctagaaaaggtaatactcacaggtttcaggggttaagccatacatatctttcagagtgagccattagccattattcagcctactgcgataatgtgcaagttccctttacaatctatgttctatgttcccatcaaggttaattagaaatattagactctttttccacagaaaaaaaaaatgtagcagtagtttcatctctaccctgacttctctctctttccttcatgcccagtaagagaagtgaggtgcaccatctgttcatctcatcaggtgttacctagaatcagagtcaggagaaagcacctcataaaactactctgacaagtaaaccatatcctgggggaccaagtganaattaaaaagctgtatactcataagctgccaaagagctgatggtactgaagtcacatggagctcaggaatttattcttgcatttagaaagtatgcatataattctctcgaaaagaaatgaaatcatatttttctgtcggatcaaattattcagaaatccgaactgtagaaaacatacaaacacacttgcttaatgttagctttttaatcttatttttgtacacagtatacttttacataggcactgaaccagctggagatgaatgcttggattttcacagctgataaaagcagagttcagattctgtccttgagctcaatgtctggagaaagcagctgtgaatactgcttccttaattcagatgcctttggccgtgaggggcatggcattttaaagctgcaataaactctgtactttttctctcaggggattagaaaaaccaattgatttgatagtgactcagcagttttcaccttcctctttagccaatgccctgcagctaagattgagaaacggattcagaactcacacctcttggtgcttggtggctcccttccaaaccatcagctgttctttctactttctttcctattttttaaagcacagtatactttaacataggcactgaaccagctggagatgaatgcttggattttcacagctgataaaagcagagttcagattctgtccttgagctcaatgtttggagaaagcagctgtgaatactgcttccttaattcagatgcctttggccgtgaggggcatggcattttaaagctgcaataaantntgtactttttctctcaggggattagaaaaaccaattgatttgatagtgactcagcagttttcaccttcctctttagccaatgccctgcagctaagattgagaaacggattcagaactcacacctcttggtgcttggtggctcccttccaaaccatcagctgttctttctactttctttcctattttttaaagcacagtntgaatcaagtgcttcagaaccatttatactaactcgtgttccaaacacataaccctgaaccctcttctaaggccaccagttacaaagaatggggaaggttaatgagtaactccaccagtgcctgccagaaagctcagctgtactccagccttccttccttttttgcagagagaaacaatggcggcagttgaacaaacggaaggcactgtaatgcccagtggcttcagttcacagggtggttctaaaattccattttcacagaattgaagataatttggggttattaccaattctcagcagctcaaattcaatcccgttgatggtgagcagggggttcattttgagagtagaaaattggatgcagtggagaatcagaatgttggatggtctctgccatttccccaaagatatcatcctaactgcatgctgctgcttttaacaaatcaggatacaacttagtattttttgtgttgacaaattttcaaatatacaaaatattgagtctgaaggcaaaaagaataatttttcacttccattgcttcctaggtcataacattcacatctgatatttcttccaaatacagactgttgttggcctgatcatcactcacacatccaggcttgttacatctccacgccactgagtatcagggaacctgccccaatattcacgtaggttcttttctattttccctaagcgtcggccaactttagaaataaagggacagagtacaaaagagagaaattttaaagccgggcatccgggggangcatcacatttcggtaggttccgtgatgccccacaagccacaaaaaccagcaagtttgtattagggattttcaaatggggaggcagtgtgcaaataggtgtgggtcacagacatcaagtactttacaaggtaatagaatatcacaaggcaagtggaggcagggtgagatcacaggaccccaggaccgaggcgaaattaaaattgctaatgaagtttcgggcaccattgtcattgataacatcttatcaggagacagggtttttaggatcaactggtctgaccaaaatttattaggcgggaatttcctcttcctaataagcctgggagcgctgtgggagactggggtctatttcacccctgcagtctcgaccataagagacaggcgcacctggaggggggctgtttataagcctatacctcctggntcgtattctctttctcagggatgttccatgctgagaaaaagaattcagcgatatttctcccatttgcttttgaaagaagagaaatatggctctgttctgcctggctcaccagcagtcagagtttaaggttatctctcttattccctgaacaattgctgttatcctgttcttttttcaaggtgtccacatttcatgttgctcaaacacacatgctgtacaatttgtgcagttaatgcaattattacagggtcctgaggcaatatacatcctcctcagctgacaggattaagagattaaagtaaagacaggcataaatcacaaggatattgactggggaagtgataagtgtccatgaaatctttacaatttatgtttagagattgcagtaaagacaggcataagaaattacaaaagtattaatttggggaactaataaatgtccatgaaatcttcacaatccacgaacttctgccatagcttcagctgatccctccgtttggagtcccagacttcccgcaacaactgaaaactctgggaaggcctacccttcacccacttccacccttcttatatctcttaaggagctgtgttcagatggttacatttcgctcgctgagcaagactgcattttcattatcctgggctaaaatcaattggtatttaagttagagcaaaaagggttctaaccttatttacagcagcacacatacacttacattagaattggctttaagggaaaaattcaatcaatcgacaaatttccactgattaccttttatgagccaagactgccatagtctcagccttcatgcagcttataggctagcaaaaaagccagacagtgcacaagaactcacaagtgtgttgagtgttgcaagagtaagtttcaggggctctccatgacttacctggttgagaaaccctttaactttttttttttctgggtgtaaagtgaagagatggcaatcagagtaggttccattgtgtcattgtgaaaagatgctgggctggcgtgtctcctgaaggccacccatatntttaaactttattttcatgcattcgcacaaatatagatgtgttccatagatgaggcagatagcagaggctttntgcctacagcaaggctagtttggagagggttttgctgtcagggttggacccacacaccttttcatagatgcttttttttttttttcccagagtttgaaagggaaatggagtttcaagttcagggaggttacagtgtagacccacaaatcagctaagtacagctaagggtggagnagtttatgcaatatccagcactcttctgattaattagaagtctttaaaattcaccagaaaccatattgtcttccctaaatgattctatatgtcaagacacagtaaagatattatatgtggaacatcatacacaaacataggtccatatagaaattcttaccttagtaaactgccaattttctgaaatgctctttaaatcctgctaatggtggcatttgtgtctttgtcacctacagtacatttctggatttgggaatgagtgttcttcagaggatcctcgctgcccaggttccctgccagaaggacaggtatgagcaaataaagtgcttagaagagctctgattcctatttcctggatgactagctttcaggccaaagtgcctccacccaccgtggttcttccaatctagcctgtgaactgtctagaggtttcccaagtcataggggcaatgaagatacagagcaatgacaacacaaagattaaaattggattggtggcacagcagccaatccaaactagtaaaattaactgtagggtttccagtaggatccccaaaaatccagggttaaagagaatccctcatattccccttgaacaccatggatgtgagcattatgataaaataacaaggtgctttcacatgtatgcacaaagatgttcatactagtgctggttagaaaagcaacaacacgggaaacaaaaatattttcaaaactttttgcaggccgtatcatagcataaaaaaatcctcatttcttaaaaaaaaaaggaaaaaatgcctgattattacagggttacaggtatgatagggtcacaattttggaggataagaatgcaaggaaaaataccaacatgtgaatgcttggttatttctggttgtgagataatgggtgatatcatatagtttatacattttctacaataaatatatattacttttataatcggggggncaagtcacatcaaaagttgttacaagaaacatatcgggttgccagatggtcatgtgcagtcgcccagagcatccccatccccctactgagttggttggtgggaaggtgggatgcttttcggatgggagtaatattgtttattgcatcctttgtttcagaataatcctcaggtctgcccctacaatctctatgctgagcagctctcaggatcggctttcacttgtccacggagcaccaataagagaaggtacaaggattagatgaattctgacctgcagactgtgggtactatgacagggactttgtgctgcctccttccccctgggccacagcctcccagagctgcccaagatcctgcttcttataggctatggtctgggtcatggtcagaagagaatgaacttcctgccagctagcaccaagtgactggtggaagaaggtgaaggaaagctgcacagagctgggaaaatacacatgtccagttccatttacaaattacctcctatattcagaaggaaatattcctaatagtttggtcttcttctaaagactgtcctgttgagttttggcttggggtttacctgttttgttttgtttttataatgactaagtcacaattatggaagattcagagcaatatctttctcagctgactagaggtatgttctttgcaagaaaatgttgggtaaacgaagtttggatagttaaaaantcacatattatggcccactgtggtttgaattaataaggtttttactctggtattcgctttgctagaaaccagcatattcatttacatactgtgccatgttccatgtttgctctaatcntacatccaggtcaatgaacgtaatcccttgattaactcatatcaggcaggttggatgcagtatgtgttatagttttgggaggcagtaagtgttatgatttaaacaaatagtgtctaattataaaaattttaggctgaggtatttgtgaagaggaatgctgctggtattagagactcggggagaagggcatgtggtcttgtactgcttagtagggcagcctgggtttatctccacaggtccttctgagaagcaaatgagatagtaagtaaaaaactataatggaccacacaaatgataaagattgcaaggtttaatcatggccaccctggaggcaggccccctaagtataaatcctggctccttttccagctgtgtggccttgggtaaatcatctgccctcttggatcctctagttcttcattcgtaaaacaaagataattatggtacctatttcatagctgtggtgaggattaaaagaaaggatgtgtgtaaagcacattagcttagcttagcacattggcacaggcacatggttagtgctcagttaatgctagttattgtcatgataactatcattaagtattgccatcatagcagagtttctgcctcatttccagggtatctctaggaggctgtcaagagaactgggcatgatatgtggcaagtgctatgttacaatgtcagtatcaacagtacttttctctcaatagatatatgcgtgggaagaggaagagatagagaaagatttctatacatgtcaaaaatcaggggataattccttcactatttaatcatctctctctctctctctgtaagcccaaatagggtaagataagcacgcagataattctgtccattctaatttatgacaacctgtcctctatgactatgttcttgactttatggcccattccctaacaggccacctggtctccggattctgcagcctgtccccattattcancaatatcttcagccagcaggagctgagctttgttccagcaggctgaaaaggagctgttggcatttcattaagaagctggcactgttccctgaatcagaattaaatctctgttcagggcaatgtagtactgcctggggagttttataaactcagctaaaaaataagggacactaggtatggctcacccatctatttagaagaactctccaaagatatccacaagaattttgtggaaatgcttcccacccaaaatctccagtgggaaaatgggaccagtcttatccataagtaggccagcctgaaattcttagttactactcatctgaaccatagcatacagggccaccacaaaactattaaagagtctatctacctacctacgtacctacctacctacctatcagggattaatttttatcagattagctagctgattgatcccttgggtcttgaaaaggcaaaagtctggagagataatttggaaaatgtggactgtgataaaaattcagaagattaagagaagaaaggcaatttaacaaacacatgataagccagcagctactgtatgccaggcatttttggtacacaaactctctgagttctcacaacaatcttaggtgacaaggatgaagaacataaggttcaggaagtctagtaactctcccaggatcacacaggtggttccaagacatacacacatgctctgaacttcatatactggganctggagaagcttagtaagaccaaggtctgaagtcncgtcctcnagaaatggagaaatcaaatggaaactaaacagatctagccctttttcccccagatggctcaatgttgggccaggccaactcaactcactgaggtaaactgtccttggtcttgaaagggccaaagcctgttgattcaggtctggtcttccgttgtccttctgtattttgtcagggcagtaccctctgaaaggacttgggtccctcttagtgancttcaatgtcccttccagcttctggaaggtcttatcctggtgtcctttcaaattcctttatcaaagtcttcttcccttcctgaagcctgaaatctggtcctggtagagaggacaccctttaaaaagaaaagaaagaaagacaaattaaggcataaatgtactacaataaaacatggacatacactcttataattttagagtacagaagtgttaatttatttttattttattttaagttccagggtataggtgcaggatgcacaggtttgttacataggtaaatgtntgccatggtggtttgctgcacttatcaacctatcacctaagtattaagcccagcatacattagccatttttttaatgctctccctcccccaatcccaccccccaacaggccccagtgtgtgttantcccctcactgtgtccaagtgttctcattgttcagctcccaattatgagtgagacaagcagtgtttggttttctgttcctgctttagttcgctgagaataattggcttccagttccatccatgtccctgcaaaggtcaagatttcattcctttttatggctgcatagtattccatggggtatatgtaccanattttctttatccagtttatcattgatgggcatttgggttgattttatgttcttgcattgtgaatagtgctgcaataaaaaaaagtgtgcatgtattttcataacagattgatttatattcctttgggtatacacccagtaatgggattgctgggtcaaatggtatttctcattgtaggtttttgaggaatcaccacactgccttccacaatggttgaaataatttacattcccaccaacagtgtaaaggcatttttatttttccacagcctttccagaatttttttttcttataaattaatatcaaaaagacaaacccaatagaaaatgataaaggatttttaacaagtaattcaacagaaaaactataaagagccaataaacaaatagacttgttttttggaaatattttgtattttctaattcataataaaggaaatacaaaataaaatgagatactatttttcacctaaaacactaaaatttttaataatactccagatttgtgaagatgtgggtgaccaggcactctcacacgttgttagtatgataataaagagttaaaatgatctgataattttgtttagaaatgcactggacgtatctgaaagaatatataagaaatatataagaaaatcactaagctctgatgctctgaggaatagccctgaagaaactggaggacgaaggtgccatttacctttcaggactttttaattacttgaattatttttacctttggcatgtattacttttgtaattttaaaggagaaaattgatttactatttcaaaaataacaaagataccacccatattctctcaagctgcgtagaactcattgttcttgccttccagagcaaggactagcatcctatgatacacacataagctaatgtttttctatggattttcctacacagatatccctcaaggtacttccccttcccttatagtttttagaaaagacaattcttcattttttggcagcatggaaataaccatgagtcagagtccatttgaagcatgatgggtggaatgaaaaagtgagaagaggccagggctgtgggcagcagatggccatgaaaagtgatgctgtatcattgcttcactgcttcacacattagagcctacaggtcgttgttgacttgagtgtcttcctgatggtactgcctgagccattctgtgtatcactcagaacattactctaaggcttgtatatcttgtatgtttttccctctagctggctgtataggattctaccttcagtttctcacaagccctttgaatccattgacgaaggccatgtcactcacaactgggatgaagttgatcctgatcctaaccaggtaacctggtcctgtgaattgaagcttatcatatacccaaagccttgactagaaatacctaaatagaataccatggtcattggaaaaaataaatagttttttaaagtattattttaataaatgctaaagtgtgtctgttttctgctcaaacttgggtggtgtattagtccattctcatgctgctatgaaaaaataaccaaaactgggtaatttataaaggacatatttttaattgactcacagttctgcatggctgaggaggcctcaagaaacttacaatcatggcggaaagggaagcaaacacatccttcttcatatggcggcaggagagagaagtgttaagtgaaagggggaaaatccccttataaaactatcatatcttgtgagaactcactatcatgagggtaaccatccccatgattcaattacctcccaccatgaatgtccctcccacaaacgtgaggattatgggaactataattcaagatgagatttgggtgagacacagacaaatgatatgaggtgggaattttggaaatgatggattgattatgtatatacatattgttaaaagaaaaacctttgacaaatctaatttaacagagtttaattgggcaaaggacaattcaccaattattctacctgtagccaggataggttctgagagattccagtgcagacactagtagaagacgatttatggacagaaaaaggaaagtgatgtngagaaaacagaaatgaggtacagaaatagccagattggttgcagctcggcatatgacttacttgaacacagttttaatagtgtgtcaccatgattggcacaagagtaggttacacatccaattaggttatggttcactatgtatggagaaacctttaggcagaacttaaaatntgtgaggaggcaactttaggacaaacttgattaacaatctgcgtgtgtgtgtgtgtgtgtgtgtgtgtgtgtgtgtgtgtgtgcacagcgacacataagcttgtatttctctnccctaanggcatataganngacacnagagtagnncngacttactaaaacngcncnggtgaatnggatgagcggaaattttatgggtgggtcaaaatattttatattttatnggtgggtcaaaatatctacacgctcaggggttttttttgtttttaatctaaacttaccacaaaatatagaaaatacatttaatacagacatctttgaagnnaggcctttgaaatctggcataggggtgagagtcttgctatctgggctgaattatgcaagtctattgtggtcacagatcactatcacagtctcttcagacctaggacttccattctttttctaggagtttcctccttttggtctantaatagtgggcgttttctctaattatcgttattacttacgtactctgcttgcagagtatataagataaaatgagacagaaccagtactatagcaatgagatagacccagtgctataaacgactgagctctttttttaaccttctgaaaaccccagtgtattgcctttgtccctgaatttaagtacatgttgctgataataggtatgtagggcaggaagaaaaacagacctgggtttgcatccctgcccatctacttactagctgtgtcttaagctatgatgtttcaattgtaaaatgggatgataacatttgcctcacagtgctattgtgaagattatgagagaataggtgtgaacctgcttcatacaatgcctggcatgtgataggcaaaaaccatgattctgatacagctatttatatttacctgaatttacattattcaggtaactttatttcttcattttatattattttttactctgaaggcttcttctgccctctttccctccctcctactctctctctcctccctctctccccaccccgccactttccacaacccaaggaaatctcctgcttcccctttgtttgccatgacattttgtctatacctgccaatctccctcccctaagtgcttaaactttttataaaacaaaagtcaaaataatttataaacacctttggtttcctgcccagatctctctcttgtcttaattatggaaatctcagcgaaataagcatctgcttgaatgttaccaccctctctaccagggacaggaagggagggaggcatttagggtggaaaaatgtgaattggtatttaaaatactatctacctcatagccactttgaaactaagatattttgtttaaataattgacccttaaacttgtatgaagtttaatgcataaagcagacatctccctggtccccagctggcctatatattgcctttaagcacattgcaaaatgcagcccctattttaacccccaaccccttagactcagtcccccacacaaagggacacagacgaggcattccgctcctccctttccccttcagtgggacaaggcccttgcacagggcacagcttgcacaaccaacctggggaccctgacttcacctcattcctgagtttcatgtggattcaagtaatatgggtatagtaattatgtatatgaagttaactaaatgagggattataagaaaagtccatgggcagatttggataaatttaaattattgtttatttataatgaaaaataattatttattattattttgnttcaagatagcaatcaaatcagtagtggttaacagggtaggctggggagttccagggctcctgcctgctcatgtcgatcacaacaattttctaagcctctcaaccttaataaatcttcatagatctgtttatagttgtgtggacaacagtggagccatacttcttttacatagttttattcggggtgggaggttaggttttaaacctaacctttaaagaaaatatgtgatgtggctntactttgagtgtgatgtgtaatatgctcagtaatatacctttattatatattattatttccttgactatcattgctacattttatttaacatgaatacaccctttcataggaactattttggagttcgtgtgacatatccatggaagacaatcttgttctaatagaatttttctagctttgtcttttttttttttttttttgagacaagagtctcaccctgttgctcaggcgggagtacagtggtgtgatcacagctcactgcagccttgacttcccaggctcagatgatcctcctacctcagtcccctgagtagctgggaatacaggtgtgcaccacaatggccagctaattttttgtatttttggtagagaaagggttttaccatattgctccaggctggtctcgaactgcaagggctcaagcaatgtgcctgccngagcctcccaaagtgctggaattacaggcatgcaccactgcacccagcttagcttggtctgattgtatgagtaaaatatacttataaaaacccaaaagtattgtagaaattaataaaatattactggacgtctcccatcattaagtgagagtcaagtatataagttgtacatgttaattcattatttcataaatagttgacatacattttgaccaggaagtttgaagcaactggattaaaaagcttgagttaatacagaggcatcaaaatagctgtatcagggtgggcatggtggttaagcctgtaatcccagaaattggggaggccaaggcaggcagagacctgagactgggagtttgagaccagcctaacctgaggtcaggagattcgagacagcttgaccaacatggagaacaccatctctactaaaaatacaaaattagccaggtgtggtggtgcatgcttgaattcccaactactcgggaggctgaggcaggaaaattgcttgaacccaggaggcggaggttgtggtgagccaagattgcaccattggactacagcctgggcaacaagagcaaaactccatttcaaaataataatgacaataataataatagctgcattggaagtttttgcttgttttttagcagaccctcagcccatatttgttccccttctccccgcttcccatgtctcccattctaacctatggttagaatggctttgcttttgtccttgaacttgttgccttttttctgttttgaattccctgaacactttctatatggtagccaccaaatgaatttcttctccaatatcttccctgctcctttgagaccttgtcttcacacacactgggagagatgtgcctcagaattcaatagcgtctcagtgtctctgtgaacaccggctccaaccaggtagcagtttattatctttctgacttgtgacctctgtcacctgccaactacttctctctccatgataaaccctggctgatcttgcaaaatctacccttttgtcttttcttttacaccttctttacaagttaatatctctttccaattttatacttcattatttaaccacagcattttgcattcatcactttctccctcataacctcctccaaatatgtactccagactctcagcaagaaaggctgagaaaattatatttaggcaccctctgacagtccttcccagctgaagcctgtgtgataggtatgtcttcacctgtcatagaccaaatccaatacttcatcagcttcaccaactatccacattagtcatctctgggaatttgaagacctgaggactgcctgatgattcctccagtgtaacatttaatcccaaaggcagcatcttgcaatatgtgatcatcactgtcatccttgataccctctcaggaagactgggggctgctccccctaaagccttcattttctttagtgtatatttaatcagttatccaagaattaatgcaacctctttttgagtgtatttaaattcagcctgaggacataaattcaattaattaatacctcacataagaagtatacctaattttatgtgtctgcctctaatttctgaaatctcagaatttaatgaactaatctacatccagtttaaccatgattttacagatttcagctagaattcctgaattagcacttctctttaagagtcctttaaaatttatttttcttattatttcattctaacctcttgattgttgaaaaatcagattcttgactcagttaagactcagctganaaaattacctcttggttcttaaccagtataatttggatcaagtgagaaatacctcaaagctaattaaagaacatatcataaaatgccttctgtctctagtacatgcaaattataaaaaaaagtttcaaaacaatatacccttacagggtatttgctgtctaatttgtcaaactttccaggttttgccatcctgaaatccccttccctccacaaatgtcttggatttttctgcctctcttgcccaagtctgtcctagtcacagccagactccttgagaaataatctaaacccactttatcaccctcattcactctttaaccctatgcaattcagcctgcccagatgactctattgaaaatatttataccctctttacacaatantgcatcactctctaattaatacatatttttatttaaaacttacattaaagtgtcaatgcccagtaattccactaacacagagttaacaacttntaatgttttgggttctttccagtcctttctttttgaacatatatgtaaataaataattcctagggtcccatgtagccagtaaccaagagtaatttaaaataatatntggccaggcacagtggctcatgcctgtaatcccagcantttgggagnccaagatgagaggttcanttgagtccaggagtttgagaccagcctggcaacatagcaagacctggctctacacaaatgtgaaaaaaaattagctgagcatggtggcaagcaccggtagtcccaggcactcaggaggctgaggtgggaagactgctcgagcctgggaggtcagggctgtggtgagccctgttcatgccactgcactccagcctgggcaacagtgtgaaaccctatctcagaaaaaaaaaaaaaaaaaaaggaagaaaaaagaaagaaggaaagaaagaaagaaaagaaagagaaaagaaaagttaatctttacttgtttttcctgaagacattaaacagtatccaatatatgacccacagcaacactttttaaaatcccctttttccagtttttcccagactccaaccctctcacatctgtcttctctcacctcacctctcaccttccccaagctcttcatgccttgtcaccattgattgttggcttctctncttcctccctgtacattctgcctctagaaaatgatacctgcactgtagatcccctaccccatttggctgggatcacacatggtgttatgtgggataacacacacataacagtgacctccatggcaatactggagttcaaaggactccagtgagaataggcaaatctgaattttccgcagagatcagggaagggaagaggaagaggctatgaatacacttataatagtgcttttaaaaaaaaatcagttacatatatatttactataattaagctgatggtgtaatgcagtcttagattatttttatttaaatatcatattttgcgcctttttccatgtctttttaaacttcttgagtgtagatatttttgatattatattataatccaataaatgtttataaaacaattcctaatattgtgagatatttgaattttttccatttttgctattatgtngtaaatccacgctaaatataatccttttctcctctacatcccagcctggaacaacagacctccttcttttcttcctgaatccccttttttccctgggttccatgacattgcatgattcccaaacctgcaaaataagtattcttcaaggtcctgaactaaaatcttgatatagtttgactgtgtccccacccaaatctcatcttgaattcccacgtgttacgggagggacctggtgggaggtagtctatctgcacaagctctttctttgcctgctgccacccaaatganatgtgactttctcctccttgccttctgctatcattgtgaggctttcctagccacgtggaactgtaagtccaattaaacctttttcctttataaattactccttctcgggaatgtctttatcagcagcataaaaatggactaacacaactctcacctcccccttgtcatcatctcccctctgagagaaggggaagtacttactctctctcttcccctcctcttccttactgtctttcttatcctcctcttttcttctccttctcttcaccccaaccttccccttcccctctgtattgttctgctaaagctatcataacaaaaaaatactgggtggcttaagcaaaaaaaatttactttctaacagttctggattccaaaattgaggtatcggcagggttgctttcttctgaggcctctctcattgacttgtatcttctccttggctcctcacatcatcttccctctgtntctatagccaaatttcctcttcttataaggacaacaatcatatcanattagggtccactctagtaacctcatttaagtttaattattcctgtaaaaacccatctccaaatatagtcacattctgaaatacagggggttaggagttcaacatatgaatttggaggaggaacacaatctagcccataattctctccttctgcttctttttccctctaaatatctactaaggattcccaatcttttggattctctttgccttanagatgaagggatagttgttgataagaaataatcaagtgggacaaactaacaggaggaactccttgagcaatagaggattttcctagctcactacactgaatcaggtgccaagtccatagaatggtgatgcctgagtatacataagagttaccaggggacttgttgaaaatgtaaattcctcagtcttgctccccaaagatcccagttcagtaggtctgaggtggtactcaggagtctccccagatgactcccatgcaggttggtgctggactgcactttatgaaattctgctgtaaagtgtgctttcaggatctctctggttccttttttccttttcctacctccacctggttcagacctcatttcttcttacctagactatgttaatgaccttctacctgattcctatgtcttcccctccctatcccacaccgtgctgccagaatcagcgtgctaaattatcatctcaaaaatctttaaatttaaccatcacccgccccctccactgcccagccaatccagtgcaggcttccagataagagatcaagagctttgattcactatcacagcctttcagactctccactcacttccatgtcccctacctatcagtcacactagaaccatcgtcattttatctacctgggatttcctgttcttccatcacaaatactcacccatctaaatctcactcatgatttatgattcattttaaataatacttttttcattatgccctttcaatatttctcagagtatttaaggttctatgtctctatcatcttcatctgatctgcagtatccagtacatgccttcttccaaatagaatcgcaagtatttgttgaatttactccctgatagttcagatcctatcattctataaataaattagattgcatttctctaaatgcattcagtggtgtgtgccaacattacagtgcacattcccctgctcagcccttttggacagcttgctagctctttttacatttcatctccatcaacttacatttcacttcttgcaaagatattggagctgtctgcaaaccagatgatttcattgcttatatctcttattttccatatataagaatgttaaataggccctgtgccaggacttattcctgagagaacatttctatttacatttctcttccaaagttatttgcactgatccacttccttgtttttctatcatgaggttttcacatttccaggatcttctgtnatggattacctgagggaaaaaacaatgtcntgttcacctccagcatctagcataaaatctggcacacaganaggttcaataaatactgtttgaaataattaatataaggggattagacaagaaacnttaaccctgaaggacctaagcagggttngtgtcccaggaatcanactggccagggtgattcagcactggaggaacagtnaacaaaggtcaatttggaaaaccaggttcaagaccnttnaaaggagggaaagcttgggtttaggagccaaggagatcaggaataatttgggaaacaggtcaagacaggctaagatcaaagggctcagggtgtaggttagtaanagggtctgaaaaagtgttggcatcagttcttagtaaaaaaaatttaactgttctaaaccatcagttttttcacttctaaaatagagatgataataataatcatagggagcctcagagagttgttgtgagaattaaatgtcatccaacaaatatttattgagtgactattatgttctatacttcgtgctaggtgctaggtaatggatttaaagctcttagctttacattcaaggacaaggtcaaatgagaatccaagttttcatccttgatggctcatcttcatttgttgctcatgaaagacttttgttatgttttgttttgttttttgagtacaggctggagtacagtgttgtgatatcagctcactgcaatctctctcttgggttcaagcgattctcctgcctcagcctcccaagtagctgggattacaggtgcccaccaccatgcccggctaatttttgtatttttagtagagacatggtttcaccatgttggccaggctggtctcgaactcctcatctcaggtgatctggccgcctcgggctcccaaagtgctgggattacaggcgtgaaccacctcgcttggcctgaaagacttttagaaatctaaattacagtgacttggatcctcattatctatattcttgcctatcacctcaaagaactccaacggatcaaccaaagcctgatttctctccacataattcatgctacctttttttcctcaaacttccaaagtttctgaagaattcaagtgagccactgttttattttaatccttcctatctttcttagtctggactgaaactcaccaccacaaattaccctggatctctctgctaacaactatttatacattgtattagtccattcttgcactgctataaagaaattcctgagactgggtaacttacaaagaaaggaggctcatagttccacagggtgtacaggaagcatagtggcttctgcttctgggagggcctcaggatgcttccaatcatggtggaaggcaaagggggagcaaggtatctcagatggcagggagcagagcaagagagagaagaaggaagtgctacacgcttttaaagaccagatctcatgagaactcactgtcatgagaacagcaccaagaaggtaatgctaagccattcctgagaaatccacccccattatgcaaccaccccccccctcttgctcctgctcccatcatatgaaatgctcccatcatatctttgccttctgccatgaattgaaaactttctgaacctctccagaagcagaagctgctatgtttcctgtgcagcctgcagaactgtgagccaatcaaacctcttttctttataaattactcaatcttaggtctttgtttatagcagtgcaagaacgaactaacaaagaaaattggtaccaaggagtgggacattgctataaagataacctgaaaatgtggaagtgactttggaactggataactggcagaggttggaagagtgtggagggctcagaagacaggaagatgagggatagtttcaaacttcctagagacttgttaaattgttgtgacaaaaatgccaatagtgacatgaacaataaagtccaggctgaggagatctcaaatgaaaatgaggaacttactgggaactagatcaaaggtcaaacttgttctgccttagcaaagaacttgactgcattgtgttcctgccctagggatctgtggaattctgaacttgagaatgatgatttaaggtgtctggtacaagaaatttttaagcagcaaagcattcaacatgtgaccaggctgttctaaccgcttatgcccacatgcatgagcaaataaatgacctgaagttggaacttaaatttaaaaataagtttagatttaaacctatatttaaattttaacttgtatttaaagggaagtagagtgtaaaagttaggaaattttgcagcctggccatgtggtagaaaagaaaagcccattttcaggagaagaattcaaacaggctgcagaaatttgcataaataaaaaggagccaaatgctgatagccaagacaatgtgggaaaggcctcaaaggcatttcacaggcctttggggcagttcatcccatcacaggcccagaggcntaggagggaagaatgattttgtgggccaggcccagggccttgctaccctgcacagcctcaggacactgttttctgcatcccagctgctccagctcctcctgtggctcaaagggatccaagcaccgcttcaaagggtgcaagccataagccttggtagcttccatgtggtgttaagactgcaggtgcacaggatacaagagttaaggcctgggagcccccacctagattttagaggatgtatagaaaacttaaatgttcaggcagaagccagctgcaggggcggagtgctcacagagaacctctactagggcagtatggagggggaaatgtggggttggagctcccacacagatccccgctggggcattgcctagtggagctatgagaagaaggctaccgttctctagactccagaaaggtagatccatccacagattgcaccgtgcacctgaaaaagccacaggcactcaatggcagcccatgagagcagccgcaggtgctgaatcctgcaaagccacctgagtggggctgaccaagaccttggtagcccacccctcacaccagtgtaccctggatgtgggacattaggtcaaagagatttttttggagctttaaaatttaatgacttccctgctatgtttcaaacatgcatggggcctataaaccctttgtcctggccaatttctcccttttgaaatggaaatatttacctaatgtctatacccccattgtatcttggaagtaactaacttattttatnttttacaggctcataggtggaagggacttaacttgtctcagatganactttggacatttgagttaatactanaatgagttaanacttttgggcactgctgggaaggcatggttatattttgacatgtgagaaggacaggagatttggaaggagccaagggcagaataatatggtttggatctgtgtccctacccaaatttcatatcaaattataatccctaatgttggaggtggggcctggcaggaggtgataggatctgggggacagtttctcatgaatggtttagcaccatccctgttggtactgtcctcatgatggtgagtgagttctcatganatctggtcattgaaaagtgtgtggcacctcccacctctctctctctctttctttctctctctctttctctctctctctctctctcactcctgttcctgcaatgtaagccatgccttctcctgcttcaccttctgtcatgattgtacatttcttgacgctcctcagaaactgagcagatgccagcatcatgcttccctgtacagtctgaagaactgtgagccagttaaacttcttttctttataaatnacccagtatcaggtaattctttatagcaatgtgagaacagactaatatgnacactatgatgactatttcaccgagaaattacttcaaaattcttggataggtggtactgacttctaatganatgtctgtctatcctcagccagtgttgttgagagtactcaagtcatccaatctagttgagtccatgggaaatttggagggaatctcagtaaattaaagaatttcagttttgaaaggganacttggatcatctagttcaactcccagtattctaactggaaatatttaggccaattatctaatattttcttttcatctctgagcatgaattttgaatcttgataatcaaatgttgataccaattctgtcttcctcctttggtaatcttaagtaatttttaattctaactttggacacccttaaagatgctttcaaattatttttgaccacctcatttctagcaagtaaaagtttatcttccaatagactcatagaatacagttgtaaaatatgtgaagcaataatacaactaaaaggataaatagacaaatccacaattttagttggagacttcaacacccttctctcaacagttgatagaacaactgaacagaaagtcagaaaagatacagaagtgatctacagaaggagcaggattggaaaaaaagttttttaaaaaagaaaggatatggaagtgacgattttacacgtgtgaagaactgacattttacctttggacttttagaaatatttgattttctagacatcgcctgaatgttattttgacttccaaaagatctcacggtccaggcacagtggctcatgcctgtaatcccagcactttgggagggcgaggcaagtggatcacctgaggtcagaagttcgagaccagcctggccaacatggtgaaacctcatntntactaaaaatacaaaaactacccgggcatgggggcatgcacctgcagtcccagctactcaggaggctgaggcagtagaatcgcttgaacccaggaggtggaggttgcagtgagccaatatcgcgccactgcactccagcctgggtaacagagcgcgactccaaccccccccccaaaaaaaagatctcaaaaatttactttattcttgttcttagcaatgttgttagtgccttagatttattcatctattcagtcattcaacaaatattaatgcctactatagtcaagccattgcattgggcattacaattgattttattatttttgaaatgtttaataagtaaattctatagagaagaagctatttaacaatagcgtatagtataaataaaataaactatttttaaaagttgtaggactatattagtctgatcaagctgccataacaaaataccacagactgggtagtttaaacaacagaaatgtatcttcttacagttctgaaaactgagagtccaagtccgaggtgttagcagggttgatgtcttgtgaggctcctctttggtttaaagacagtccttcttactgtatcctcacatagcccgtcctctgagtgcaagcagagagagagatctcttcttcttataaggccatcaatcctatcagattagggccccacatttatgatctcttttaactttaaaacccatctctaaacatagtcacattgaaggttagggcttcaacacacaaatttggaagnggacacaatttagtgcatatcaaggactaaatcagtcagcaagcatcctttacttctttcagagtttctcctctggagagaattatggaattatagttctcaccagcacccattgttatatgtaagaaaaaaacaaaatttgggagagaaaatggctttcctgaagatcacagagtaaacgggaacagagacagtagcaaaaaccaagtcttcggtgcactctccttttggtctggccttggctcagagagttactgctccacagcatacaataaagctgcagctggctttagtagatgtttgtaccatgcactccatggactcttcctattaatcctctgctcaaatctccctcctcacacttatcaaaatatcacatcagcgctcctgaccaaaatctctgctttctcttgtgagtactgagtttatcagaaccaccttggggattttcttatccttcatgatacaggcccagtatgatctgaatatagactctgtataatcttctgccatcagggccaacagataaatgactcctctccctatactatctctgtcatttggtggggatcattttttgcattagagaaggttcgtcaaggtcgttgctncttccagattgtgggccctattgaaggtatttcctctccactataaaatgtatttgcatttcctcccaccacctcaggctctctgtcctcataacttgagggctaatttgctacaaaaaaccttgaaaattaaccagctaacctggtcaacccaccattctctctggctcaacctttcccacccaaaaaaaacaaaccccttctctaagggccaggactttattaccactcacagcaaggtttttgtttgtttgtttgttttgttgttgttgtttttgttgttttttgttttttaaacagagtctcactctgtcgcccaagctggagtgcaatggtgaggtcttggctcactgcaacctccacctcccaggttcaaaaaattcttctgcctcagcttcctgagtagctgggactacaggtgcatgccaccacacccagctaatttttgtatttttagtaaaaatggggtttcactatgttggccaggcttgtctcgaactcctgacctcatgatccaccccccttggaaaaaaaaggtgctggaattacaggcgtgagccaccgcccctggccttaccacaggtattttaacatcaggcagatgtacaaagatattgtcccagtacaacaaaccaggcagaaaaatcccctgctactgggatttctccctctctctcttctttctttccccttgctctttcttcttttttcttgatcactttctttgccaccgtatggcccaagatgccagaaaattagttgattgatcagttggtgggttggttggtttgttgactggatggacttttctgagtatgatgcttggttcatcaatacaagaatcacagaacctttggattgggtttttaaaccctagctgcacattagaagaacttttataaaataccgatgtttgggccctaccttcacagattttgatttaaattggtcttggtttcaaaggctttccatgtgattttcatgagtggccaggattgagaatttttggatagagctaaaagattacgcaggcaaccattgatttgaaaattaaatcccttttactgggaaatccagaaagaagactctttctggattttctttccgaaactaagattttaggtagtattgttttcctaagaattttcctgggtataaataatttgctttgttactatagaaggaagcagcaggtaatgtttagtggtagaccagaaattcccctaaaaaatccagcagtggttagctgtggcaattcctgaagttagggaaatatcctcccaggtcagtggttttcaaatgggagaaaatttcccccaagtgaagtttggcaaattttggagaaatttttggttgttacaggttggtggaatgtcaatggaacctggtggaggcaggccatggatgatgctaagcatcccacaatgcacagaacaccttcccacaacaaagaattattttgtgtaaactgtcaatagtgccaagattgagaaaccaattcctagatccttgccctcaggtccccctaataaacccctaagagataccatccttaatgaaattagtcctaaagcatttccttttttttggagcatgatttcagcaatgtttcccaaattaaaattttaaatcctttttaagtattttttaaagtgaccatcctgctttggttttaagaaaagaaggctgctgcctgactgtgtgtgtcagagaggcagaataatcccaaggctgccttttccaaatggtggttcctttcccatttggctgcctccctgaaaaacagaatgagatgagccctatgacctgatggaggccctgccaagcccaccttgaccaggtgctgcagccagtggagctagttttcagggtgcgggtcgctccatgaaaagtggcagctgggcttatcagctgccagcctggataagtcaggcctgctgccaagttgattaataagcgctgggctgacaattcaagaagggcctaaacctgctgattttcctccccttttccttagatcatttcattattaaattaaagattgttgtgatttaaattgaactgtcaggcagcttagggacaaacgtggggtttggtgaagcagctgaacctggtactgcatttaccaaatcagatttcagctgggtgtcttctttctcttaaaaaaacaatttagaantttaagggcttgaagtagaagtagaaccttcccctgcagtgtcaggagcccacacagggaggntggcatgccaggaaagggacctgattataaatagcatgaaaagcagcatcagtcaaaantcactgatgtgcctgggcaaaatgttaaaagaaacaaatagnttttaaaaatggaagcaatggttttatttttataatttaaagtgntaaggaacaaaagcagtttatattcacatagttttaaacacacaaacatgtgtgtgcacgtgcacaaataacacacactaacagagtccctttaaggaaatgatggataatcattttaatataacaaaatcacaagtagagcctcacagagggggtagctgtcctttntttttctatgtaattgatgctatttatttagaaggtctatggtttacccttgtgaagtaatttttctgtatgtgtattttttttccagcttagatggaaaccatttgagattccaaaagcatctcagaagaaagtagactttgtgagtgtaagtcagtcccatccacacccttcctactgctctcctctcttctgtggtgagtgagccaaccatttgcagcctgaatgccaagcaaaagcagccctatcaggaggcagcacacacaaaaccacctgcgtatgctttgggggctggcggagggatgtcttacttacagaaaccatatggcccctgacaccagagggtattcatgaactatttatatctcagaaaggccaatgacaattgaacattttcttacttgccttcctttcttttggctagaacgggggcttttaacctttttctcactttgatgtctgatgtctgatgatgtctttgtttataaatatataaaataaattatataaaattacaaagaagctaatgatattgaaatataacgataaaaatactattaaaaacaaatttgatttggtttatagtcattcatgtgctttcttgttaatgtgctaaatcataatatctatgggaaaacatctaataattctggtatgagcataaatatactttgaggtatctataacaactataatgtgatatccatgatttttatcattgataaagttacaggcacctctaatactgctgtggttttttgcctacattcatattagttgaaagaaatgataaatttcactcagagattagcaaaagtaaatataaaatatttcccatccaagttcataaatctccctgaagtagatgcttgggctagaatggcgtcaattcaacatggcaactctagttagtacaatgctgattggaagctctgtttggtagttataggtcccaggagtactggaataactgcacagagcaaggagtatctgggggagaggagaaaggagctctaaggaagtggggctcaaagagaccagtggagggttctgcagaccagcctcagctcatggcttacgtagggacactccaagtgccgagccataggataaattgttggaaacatcttgaagttctcatctttattaagtgctccaaactctttgtagactcacttaaatataccctaaacttacaaattgagttaaaatacaaaatgatatccccatctcctttcttgtgtgaattgtagatatctggaggcgcagagctctctccttttggctctccatctgcaggtttggggctgagggctattttgagaagacccatgtgttaaggtttcttgcactatggatcatctggtcacacagcaganagaattacagtccatctgaatacagtcctctgccctgttccaganagattaggctgaccctatccataagcagagggctgcccatagtggagtgtacttgagaggcattaactggtccctgatgctgcaaccttcctccccaagcctcctagatgcctgatggtacctccaacagaatctcttcttccagttgatgtcaagcatcaaattgataaaataccaagtaatgaactgatactctgtaagttcttctgatatagccactaagacaacccagatttaggccatggctggagactaaggtaaaccacaaactaccaaacatgagtcagtaaattcaggctccttagaggctgcctggattccaaacgtcccaccggtcccaaagggaagacctagtagaaatgtgcctcatgaacctcagggaacagtggaaaggctgcctcttgggcaccgttcacattaacctttccctcttctgtgggtctctcccagggcctgcataccttgtgtggagctggagacataaagtctaacaatgggcttgctatccacattttcctctgcaatacctccatggagaacaggtaagtggctcagttttagggaaggacatgcccatcttctaagggattttggccagaagtcaaactccaggtttcactcttgtgaagtcacatatgcacatacatagttgtttttgttattggttttctcctcaaggcaatattcatatatatttattgacaatgataatgaatgagacaaaaggcatttatcttgactgaacatcagtgatataaacaagcacatcacataacaatgtnaacagaaaagggaggatggagccctggaatgcaggagtagatcnaaaggcattttgactttaagtctgagtccaaatatgcttttgttgttgtttgatatttcaaggatttttctgagccaaatatgagtgaccaatggcctgcgacacagccatcaggagatcctgagaacatgtgcccaaggtgattgggctacagcttggttttatacattttagggaggcataagacatcagtcaacacatataaggtgtacattagatccaaactgtggtttttatctcagtagaaaagtaacagcagatttaaagcaggcagaaaagaaaacagagaaatagagaacttagaaactctgtagttgcaggttgacctttgggctctgaatgatacaattttcccattggtttaaaatgtgcacaacagactgtaatatgtaaccagctggagtactagaaactctggcatacccttgaacttttccattttacacaaacacttgcaagtagaggcacctttctccttgtctttcctcattcttagattatttgtttcccacgttttttttcttaaaaggaggaactgagctgtgacctaggggttttgtgggtggtggattggtgtactgaatgtaggcaggactccacagtgtttcaccaccgagtcgtttccaccctcttacctgtctcagtttctctctccagagatctagcacctctgagaggcctcaaaatgccaagtgatcagctcttatatgtatttccgggacaaaactatttttgggggggttccctgtagggccactgcacatcacaggggatgaatccctcagacactgcaactcagcccctagtcacccagggtgcctttcagttgggaagaacaaaatgccctttctcttcagagctgaaggagctcagtctctcatttatgcacaaaaatgacagtcacacgaatgcgcagcaaagccaactggagctaaaatttggggaggaaaaaccaatgggaggagaccaatttagaatacacctccaaacttggaaacccaaacaggtacccaaaaagggagtcattcttgttgtctttagaaaaagacaacggaggccgggcacaagtggatcacgcctgtaatcccagtactttgagaggccgaggtgggcggatcacgaggtcaggagctcgagaccagcctggccaacatagtgaaaccccatctctactaaaaaatacaaaaaattagccgggcgtggtggtgggcgcctgtaatcccagctactcaggaggctgaaaaaggagaattgcttgaacccgggaggcggaggttgcagtgaaccgagatcatgccattgcactccagcccggacaaccgtgtgagactccatctcaaaaaaaaaaaaaaaaaaagaaaaagaagaaaaagacaatggagaaatcctttagaatggacctgtgaactagaattaggaacctaaacaagagcttcctaggagggaaaaatcaagaactgtcaaccaaacagggctcaggaggacttaacagttccatcagagganaagcccaaagttgaaggcactttcaataggtccctgctgataccttagctctgagttcaggcaactccttcagggttctgagtcttctctgaggcccaatgtgtccaggtgccaaattattgttgacaaaaatagtcaaactattaatatgtaaaatatttgaattgatgtattctgagccaaatatgagtgaccagtgacccatgacccagccctcaggagatcctgagaacatgtgcctttgaatatccttaatttctaaggttccccagggctgttcttgagtcccaggtcacagtgtgtgagtttccattaggaccacccattagtagcaggtaacccgactttggttcagctaacagctctgtgtaagcttaaaatttttaagtagaggagcttatatactggctttgcaaaacaaagtatgcaaatggcattcctgccttattatacactacctctggaactggaccatttgtgtccaaagcccaactttacatttcctggctgagcgaccttgtgagccatgaatcagggacaagatcacagccctatgacaaggctctggaggcctctctttgggtcaaatctcatatcaggccactccctctctccacttgagccgcattggccttcattcacttctttcaagctgccgcgtgccctctttaagcacttgcacttgctgttccttctgcctggaacattctttcctttctccaaaccctcacctagataacaccttcagatatcaggtcaaatgtgtccnttctttgaagaaccttttgctgattcttcaaactaaccaagtcgctattctttcattccctcaaacttgattttcacagggtcattacagtctgcaaagatattgttctgtaattatttgattgctctctgactccccactagactctaagttccacaagggcagagcctgggtcattttgctccccattttatacccagctctgagcttgcnacataggcactaaacaatgatttgtgttatgacgtaatttgtctagacaatgttaaaactgaaaatcacaagaattactgtatatgtttcagatgcttttacaattcagatggggacttcttgattggtgagttctgaagacttcagaccccctcactgataattgacccctaaccgcaagctgctttctaattttatacacattattttccttcattcttcaatctgtcttatttcatttagtgcaatccagagactgaggtctagaggccacaggtggtctggaaaggttctagtgtcctcaacgcccctactctattcctggctctctgtctttgcccatctcttctggacctttctgatgtgggagcctgggcagctgaaaagaaatgaagactaatactaatgggattaacttattacggtaactgtatttgccttgaaactctctcagtaaaagcccatttatcattagtaactgcaatttaaattcaaattttcatgagaccatctaaaatgtaaagtctatcagagattgttctggtctgcctattatacttgatggttttttagtatcaatattttggaatcaacattttcgtgtatatgtcacacaagcaaatgtcagcctttcactggaactatcagaaatgggtgattttccatcctatttctgctacccctttttgaccatgtcacaaaattgtgcatatacaagttccttgcctggtgaccaaaaaagcagagtcattgttttattcacattcttctagataggaaaatagctaatctaagttgtcagaatttatctttttccccaagagactcaataaagctttttgcatttggaatggaaaagcaaatgcagccttaagcctttcctgttcatgaaatggttatcacaccaaaagaattgctcaccactgccctgtctttttttgtcagttccgcagaaagggaaccttctcatttacaccgagtttggcaagatgcttgtacagcccaatgagatctgcgtcattcaggttggtgatgtgtccccttctcttccctgcttctcactaatttgggagcagtcagatgtttcagctgctgctatttccaactctaaaattcgtctgtcatgtctggacaacgaggagggaatctgagttatgcagaaggttccatgtgctgaagagtaagcaagcttgggtgcctgctttcttttaatatagcacataattctaaaggaaagaccacttgtcattgcactttcctaaatatttacatatactttggataaggccctgttcccactaatggcagtagaggcagtgaaggtggactttttttttttttagtgtggctaaatcaggcttaccattatctctggacccaatgagagggtagactagaattggcttgggtcacatgtgtgattaggaattcagtttttctttttaaactgaattttaaaaatttctttttaaaaaaattcagtttttcatgtttgctctggtcacctcccaagcagctcaacaaacaagagctttacttttgcatgtgggatgggctatggctctgggcagcttctttataactacagctgtgatttcagagggcacaccagtgtctgctttccattccagagaggaatgcggttcagcatagatgtctttgaggagaccaggggctacatcttggaggtctatggtgtccactttgagttacctgaccttggaccaattggtaaatcttcattacaagcctctaagcctcgcttgagatgtaggactcagataattgcatgaaagttaaacatccttctcccttcgctgtctcactcaaacttccacttttctctctagacaaattcttctctagaccaagtgtcttcccagaaaatatatgcaaaacagaaagcaacccaaaccaatccattataaatctctctagaatagtatacagacattggagataaagacggcatgtaatagatttctggttgcatagtgtgtacaggaaagaatatagaagtttgggttactgtgggcttgggtcaccagaaacagctccacagaagagatgagaatttgactaattctttatgaaaagttgaggagagtaaagaggaaagggaacagctttgcaaaagcatataagtgagaataagctttgtgattaggaggaagatatttttgttaagtcagtgagatttataatggattggtttggattgctttttgttttgcatattgtataaaatgggaaggccataaaaatgccctgggctgtattcctatggaaaggagggatggactgggtgacacatagtctatgaacctctgtgtacaccccaccaaatccacacacttagcagtcaaaaaaacacatcactcagtgctatgagagatctagaaaccacaccccaggaggcagattaaaacattccaaagtgaaccaaggtctccacagcccccattcttctggcaagctggaggaagtgaaaatgttaggaggggttgttctcaaactgtctcttggattgaaagaaaaggctgggaaaattggcccttggtttactctttggtcacatctcccaattctcccttccttgtcaacagctttttagagcaaacagggacaggccagtgtgtgccttctggtcagctcctctgaggaatccaaatatgcagaggaaggtgggaggcagcaagaggcagctggagccgtggtgggccgtctgtcatcctgttcacctcccactcttcccatcctgctctggcttcctgctgctctatagtcagcatagcctccaggttccgtggaacatgtaccctctggaaaatatctataatttgctaaccagccggggacttatttttttaagtcccaggagctggaaatgataaaacactcctcagctcgctcctctcagagttaaactgtttttgcacttaagtttttcatgtttggtcttttgatttatttcctttctctggaggaaacactcactcctaagcaaaggtaagcaggcaggtcctaaatacttcttcctgagtggcagacagggtttttcaggctggagaaccgttttcagactggaatctgagttctgtctagggagcagaggcatgccttaggcaacagcgtgtaaccctttctatctgagatcaaggactgtcaatgacttctagaatattcaagggttccttcaaaagaaaaagttctggagttctatcagatcttcccttttcctcttttcagttctctttctctcttcccttcccctcacctgtagtgataagataatgcatataagattgttttgttaaccatagtcactccacaaccttagaaagtaatgctggtttttgtgaatttttttctgaccagattccttgggtcttcctaaaaggtaccagactggaaatgcagtgaatctttgagcaatgaaagcaatttgtggagtagctcttgacatgaaagaaagcctttctcttcatgcaaccatgggcatctttcctatgttttggaagtttctaaaagacttttgggttactgttttctaggggccaatggcttggccaatcctcgtgatttcttgatacccattgcctggtatgaggatcgccaagtaccaggtggttacacggtcattaataaataccagggcaagctgtttgctgccaaacaggtaaagtaaaagggttggcaggcaagggaggaaatgaagagtgattgagcacttactgattgccaaggcgagtgttacaaactttacatatatcctttcgttgttatcataccactacggcactacaaataaagcaaatagttctagtagtcaattatactttcatagtcatggaaaaggcagtaatgataaataatttaccaatttcacagtaagtggcagaaccagaatttgaacccatatctgtctgactccaaaggttgtgccctttctactcaccaagcaatgaaaatattagcaatatgtaggtttctataagtggtatggaaaacataatatatgggcagcataatatgttctgaaaagtaaatgagttaacagatcagccaagatttatagtctccaataccaccctatttcaaatacaagcaatcctacaaaacaagtagaattcagttaattagcttggcttggtttgtaccaccaggctggcaattcaggacacaagcaaaggcacagatattaataaataataataacaacaatgtaatatggactctataacataatatattactaaatgtactgaatatatattagaataaaataatcatataataagaagaacccaaagatctcttctgtttagcattatttgtttgcttcattttgtctatttgaattattccttatattttccaaggtatgttattcttcttaggcagcatctagagataatgccaaccagccgaggccaaccagtttggcacttaaaattaacccctgaagcagacatattgttattctcttattctctgggtcaaggtctctcaaaattcggggggtatttgcatcagaaatcctcaaggaggcttgtttaaaattcagatcctaggctgggcatggtggctcatgcctgtaatcccagcagtttgggaggccaaggcaggcggatcacctgaggtcaggaattcaacaccagcctggccaacatggcaaaaccccgtctctacccaaaatacaaaaattagccagatgtggtggtgcacacctgtaatcctagctacttgggaggctgaggcaggagaatcgcttgaacccaggaggtggaggttgcagcganccaagatcatgccattgcactccagcccgggcgacagagcaagactccctctcaaaaaaaatgcagatccttagatactactctagccttgcaaaaaatgataagctttggagatgggacatggaaacctacattcattttaagcatgttccccagatcattgtttacatacaattgttaaagaaccacaattgtagaagcagccagtagctcctccgaaaggtttgcactttccaagtggaccctgtgctggttattttctgtgtgagtcccactgatccattctccctctttgccatgatctgtgccctggaagttgactgtatcacccgggctccctaaccactggtttctgttgggttcaacccacagggaaactacaggcaggaagaaagacaaattgggatatttcttcccctgcttcctcgctgtttaagaatgtgtttctgacagtagctgcatcccccatatgacctcagttcctgttgggtaaccctagtggtgggctggagctgattcatagtgacttgcaaaagctgatatgcacgcttctgtccaactgtgtatttgttgatgtcatactggtagctaaaaaatcatcatggtgagactgtatacaccttagaaatcagtaaacactatatgtcaatgctttatgtatttttttcagagtgctagttgtgaaatatttaccagcacaccactgggtaacacccttctttataattctagctcttgctaaagtcctataacaatatttccctcctcattccacatgcccaggaatagcagtgtcttcccgctattgctaggctcaaatacctcaacatttctagtcattccagttaaccctaaccacgcctctatgagtaacgccttcattaaaatctttagcacttttcggaccatagatacgtttggacctcctttcctatagcaggacactgattctcttctaccccaggacagggaccagggaagtattatgttagggattgcttctgaaatctcaagtcttgggagttgggaacttttaggaggccttcttcccttcttcctggactcaccaacccaggcactgtgtctattgcaagctcctctaggctgaaattacctggagaagcatcacagcaggtactctctgttccaggaaacagaaggtagcccagattgtttgagacctgctgacaatccacagatcctcacagttaggttaaaaattgttgaaaaggcactacttggagaatgtgctgtgtttcctgctgcatgtgtgatcagaaggcagctgcagcttatgaaccagaaaaatagggttagtggctaagtagagggtgtgtggagcaaccacaaaatgattcagggttatacttctcccaaaggacggtaaaattaaatcgagaacaaaatcaaatcaaaagaagagagaggtatactcagtacatattgtgggatcacagctacaaaagcattagatggtaaaattatcctttcctgctttttgtgtttaggatgtctccccgttcaatgttgtggcctggcacgggaattatacaccctacaagtacaacctgaagaatttcatggttatcaactcagtggcctttgaccatgcagtaagtctgaaccctgtaggggccttgggatgaggcaacgcttgggtgggaggggtccacagtagacccctgacatttacagatctaacatttccaatgtcaccgttgggaagccctaaatatagtcatttgtcctttggtgagggagtaaataacacaactagtagggaagcaaagccagatactcaacattcccctgtgaaacatagcttcattctctacagagcattggtgatactctgacttgtatttgccaaactaagtggataaacacttagtttctttgtggaaaatttatcccccaaaacaaccaagtgttaatgtcggtggtagaatgaggagaaaggaactttatgaatttggagaagtccctgaccccacaactctcaagagcctcctctatgatctctgacttctcaccccagtgccttcattcctggctgtatttggcagtgacagagtgaacagcccacttctaaagttactcataactttcagtgcttgagtttaaaccaaagaaattctagagcatgaacttggtcatatttttcactcagttcgcaggccacaaatggtctctggtctacagtgcaggctcccaagaccctacattcttaataaagtggtggttctgagaccccggggggaagttcattttgcagctcacttcataagagatgaacctaacccacaagctggaaggataattagagcagaagtcagagactcagaggcaaaaggattattgtgagccagttcagtttatctctggggggacaaacctacctctccaaacagcagcaactcttaataaaagcaaaggggaaaagaaaagtgagacatcagaccccaaacaaacagcacgaaaaaggatcctgagacactgataaagctttatttgtgattcactacctttgctttaatagtttcagatcatgtcccatgacagttgaagaaatgtcaattctcacagcaataagggttgggtttatttttatttgaatttacacagatgcgatcttctctgtatttgctgcaatagttatttttccaaaatttagttctgatcatgccaccactgtctccattagaaagcctttgcaggttcccatgggcttaggattaagtctgcactctgaaccatggtgtttgatgctcttcaccatctgtcccaccctggaatcattttccagtatcacctcttgcccctttcccttctgtcaaagcattggggttttagccttctctcctcttaacaaaatttttgtgcactttgatgtgttttcagtgattaaaangtcatttcccttccttcccanttccttagtcctccctccctccctccctccctttttcccccatccccggccacgtccttcctttctttttttttttttaacttttattttaggttcaagggtacatatgctccttccttccttccttctttccttccttccttcctttctctctctctttttctttctttctgttcattcttgaagacctacctcaaatgtcacctcctctttgaagccttccttgacctttcaggtagaattagctgcccaacccccaccccacaattaatgctaaagaagcagggaatcgatccccatgatctttgaatctccagactcttacatggcatctgaaagggaacatgattgttgatttcaattaaattgaatctcaaccttctcactaaagaattctgaagagttttaaaaagtataatttcgtccctcaacctatcctatctctacactaccactatgaagactacggatgtaaatgctgtgttttagacctgaaagtcaaacaaaggtaggaaagcaatgaaccacttctcagacttttctgccaatggatacaatctggaatctccgtattctcccaaagaggagcacatctacaccaaaacttggattttgctttatttctatttctactttgctctgagcatcccttctgctgcacatctcagctctagtcaacttgatctgaggttgagaagcaggcaccgttggttctcatacccacggggtaataagttgcatgtaatgtgggctcagcagggtgaaaaagcagttcagaatccttttagctggtgttaattcattttgcctcaagcacagcaagaggaaaaagtcatatgagtgattattgcaccttgatgacaagcccagacttctgttgtttgatcagaaattaggctgtccgtttgcagcaacatggatgcagctggaagccataatcctaagcaaattaatgcaggaatagaaaaccaacttctgcatcttttcacttataagtgggagctaaacattgagcacccatggacataaacatgagaaaaatagacactggagactactagaagggggagggtgaaaaaactacctattggatactatgctcgctacctgggtgatgggatcctgtattagtccattttcatactgctgtgaagaaatacccgagactgggtactttataaagaaaaaggggtttaacatatccacagttccacatggctggggaggcctcacaatcatggtggaaggcgaaggaggagcaaaagcatgtcttacatggaggcaatcaagagagcatgtgttggggaactgccctttataaaaccatcagatcttgtgagacttattcactatcatgagaacagcatgggaaaacctgcccccatgattcagttacctcccaccgggtccttctcacaacatgtgggggattatggaagctacaattcaggatgagatttgggtggggacacaaccaaccatatcagatcctaaccccaaacttcagtatcacacaatatacccatgtaacaaaactgcatatgtatccttctatctaaattaaaagttgaataaaaataaataaaaaaattagaatgtcacttgcaaacacttcatgtatgcatgaaatgtgtgtcattgtccagtcacttcccttgcatcatgcgttcagtctctccttgtgtgttcacaggacccatccattttcacagtattgactgctaagtctgtccgccctggagtggccattgctgattttgtcatcttcccacctcgatggggggttgctgataagaccttcaggcctccttattaccatagtaagtctctcttttaccaagccacatttgcaagccaaagagacaacaaagcagtgagcgctacacattgggaataatgcctgggttatttctggacacccaccatggcatgaattcaggatcctgctgcacaaggcctagtgctgatccccaagctttaatctctttaagggatggtagttgtgttagtccattcttcgttgctataaaggaatacctgaggctacttaatttataatgaaaagaggttcatttggctcgtggttatgcaggctgtacaagcagcatggtgctggcatctgtttctaatgaagcctcaggaaatacaatcatggtggcaggcaagagggaagctggcatatcacatgatgagagcaagcaagagaaaggaagaaatccccagcttccttttgaacagccaaaccccatgtgaactcatagagtgagaaactcactcataaaccgtcatgatggcaccaagccatttatgagggatctgcctccattacccaacacctcaanccaggccccacctccaacactggggatcacatttcaacatgagagttggagggaacatacatccaaactacatcaacagtgatgcattgattctgagcctagttcccagtttctctgtccctgtaagaggcagaaaggctggtaaagtttagaagccttgttagaaaggcttctaaacaagtttcctcacattttagatgtttccttttggggaatactggggaggttgttagttagtctgttgttttgggaaagttcatcacctaagtctggttcagagaaccagagaaataagaagagagagacagagagagacagagagagagacagagagacagaaatgtgccttctccaattattttggcagggcaaagcagactgcagaacatttgttgcctagtacaagaactaacaaatctactatttttattttattaatattattattcctaccccttataattattggccaatttctatggcctgttccaagttttttaaaaacttactcatgaagtgtttataatcttgtaagagacaggtagtattattgtcccccccgctttttttttttttttttcagaaaattaaactgacacaagagggattaagtaactctctcaaggactcacagcaagttaagtgtagagtcaggatttaattgcaggctgtctgataccagagcaaacactcatgaccactaactggtatggctagcatagtgcctgatatatagcatgcttttaataaatatttatttaataagtgaatgcatcaacaagaataaataaagtacttcacggctgtacttaatgaggttgacatttttaattgtgcaatagctagctgaaaatccaatcaaaggtcaatgtgcaattctacttcctggagtgtgcatttttttgtgcatagagttctggaaagactctaagaggcattccacctggaacattctagaaaacaaattcctttctttagtaaactccagggccttctgtttataataggtccctctctatatataccagttcccaggtgtcagggctcaacagaacacaacagtgcactgaatggccaatttagctattttatagcatcaggaatgaaggcccttaggatggacgtaggccactccatggtcaaatgccagcatcccccttttcagatggcaccatcatggtagagaaaagaaaacaatcagttaccatggcaaagacggcagctattttgtgaatagcatcataagtcgtttctaaaaactgtgaagcctactaaagactctaacttttctcctcctggaagttagtgacctagaggacctgttgtcaaggagagaaaattgccctggcttatagtccgtacttcgcatgttactccttaataattcaccatttcactcttgttcttgtattgaggttactctgtgtgcctgtagtggttcttacattttaccatgtgtcacagtcagctggaaggtttattaaaacacagattactgggctccatcctcagaatttctgcttcagtaggtctgggataggacctaagaatttgcatttttaacaagttcccacaagtgatgctgaatctgccttttttttttttttgagacagggtctcactctgtcacccaggctggagtgcaggtggcacaatctcagctcactgcaacctccaccccccaggctcaagtgatcctccccgctcagtctcctgagtagcttggaccacaggtgtgcaccaccacacctggctttttttttttttttttgtattgttagtacagacggggtcttgccatgttgcccaggctggtcttgaactcctaaactcaagcaatccacctgccttgacttcccaaagtgctgggattacaggcatgagccaccatggctggccagaatctacatttttcactggcaagtcaggggattctgatgaaggaagtttacagactgcttgttgaaaaaatactggcctaggtgtgtcccatccctaggtggaagaataatagaggtccatctgatttagacaagttgctactgtgctatgggtctcaacccatccttaatttttatttgtagttcagactcgctgacacaaataatcttgagagatgcctcctatagttttttaatgactcncaaagtaaatttggccccagggtagatcttataaaggtatgggtaccctgagttcgttgggaaaaaaccacagaaccccaggttagaaatgagttttccagagatattaaaaatattgccttggcaatacncaaaatctttgctgctttgatgtgactttattataagagaaaatggagaattatttctatagaaatattgcctccagtcatcttaatgtgccttagtcaactagattcagctttttttttttttttttttttttggagacggaatctcatctgtctcccaggctggagtgcagtggcgccatcttggctcantgcaagtttgcttcccgggttcatgtgttttcctgcttcagcttcctgagtagntgggatacaggcgcccgctaccacgcccggctaattttttgtatttttagtagagacgaggtttcaccatgttggccaggatggtctcgatctcttgacctcgtgatccacccgcctcggcctcccaaagtgctgggattacaggcgtgagccactgagcccggcctagattcagctttaatcagaaaggcaaggtctatcctcccactgtcctttgaaatatagaaaatgatatagaaatgtcatcaccaagctcactgctatctaaattcatattcagatcaaagctgaattctgttttgctctcttcttaaaattaagccatgaaggtgaccctgaggacacatactagagcaaggagcttgacaccaaatttaagtcatgagctgaactgtttttaaaacatagacaatttatgcttacatttgcttctttttctgtatttccacttcatagagaaacaagtagaactatgatctgggtctcacctcttcagcaggagctcacacactctcactcactttgtaggggcctgcagtagctttctgtttctgagcagggtgggtgtggctgcttagtcaattataaaagcatttggcacttggttatacttcacatgtaagcaagaagggcaggcatgtatcatgtccagtgtttgattttgtaagggttgccactgccacatctctctattctgtccttggtttgccctctcagtactctcacaggacagactatgagtagctttaaaggctatgttgttgttgttgttgttaattattcttttttaagtagctttaaaagctatttcttattcatctctgtctcatgttagccagcacatatctaattatatgtgctggctaactggatgggcagatgggtgaagtgggaaaaagacagatgaatgaatgggtaagtagatgtgtggtttgagatgcaaaggcacttaaatttgcccaggtgttatatttctttaattcctgctctattgtattgctactctaataaagagctttatttcaatagaagcataagattggaagagtggaagcatggtgatttttgttaaattttgtgtgactctagaaagcacaactaggaccaatgaatttaactcatataaaagcaaatttccatttaatataagaactttcttacacacagagctcttcaataatatgatatgctttgtagagtggagagcttccattcacatccaggcagagcccgggaggtaatcagtcaggaaagatatagaaatttcttctacattgagtagaagtaaggataccttccaatttcaagatttaggactctatgaatagggtatcaatggaactagaaaaaataaaaacaaatccaaaagacattctgaagaacagaaaaacaagaggataacagattcatctatagaagataatatttgttataataaatagcatttatggtctgttttatacacataccaagattctttcacacagattatcatttgataatggactttaagtctggggttcttttcattacattatcatctatcatccatcaaaaccacacaccctcaatctaagccttctagattgggaattagaaatatgctgttgctgtgtcctacagtggagctacttgggaaagggttatgatttgggagataaagataacttttgataacagggttcgtaaagctttaggatgatagagaacatttcggttttctattatgactagcattttaattattattattttttttggcccctgattttttttagatttagcctgattcctgtcagagagtggaactcgagacctctgataatccacatggccatggagtagagctgtgcctgccaagaatgccaatatgaatgttttatgattgttcttctgtcaatccatattctttattaatcctatacaatttactagtttctcctgtgttcttggaattctgcagaaataatgtttaaggggctttgtgttttactggtcttgccttggataataaaaataatactgcttcaaccttcccagggaactgcatgagtgagttcatgggactcatccgaggtcactatgaggcaaagcaaggtgggttcctgccagggggagggagtctacacagcacaatgaccccccatggacctgatgctgactgctttgagaaggccagcaaggtcaagctggcacctgagaggattgccgatggcaccatggtaagtatgttaactgccacattccagcggcctctgaactccccacccttactgagaagggttgccgtttttcatttctccaaagtcacagaggaagaatcaaaagaaggaaagttaatgactgcataagtatgtttacatgtatatatactcacatccttgtgtatatactagacttctgttgtggtggtgtaggaaagatcattgggacttgggagtcagacctggttctggagtttaagtcccatctcttagttcctacaggatcttgaacaactcaacttagcttctctgtgcttcattttccccatctataaaatgggtatagtatccaacccagcagatggctatgagttaacctaacagactgtccaacactattcaaatgtaagggaacattattaatactatgtgaagcctcttcctgtatccttatgcagccctgggcatatgctatgtctcagagtcttctgcgttttgaagtaatcctccagggccacagtagtagcggaggcaggatctcaccttcagcacgtgtttcaagccaaggagggtcaaaaagcccttgcctcactatagtcagggcttgtgagaagcaattctcagctgttttttgcattttcctttgctctgctttggcatggatgcaactgatgggatttaaaacctgttttgtattcttcctgtgtcaggctgtaaacattgaggctgaacacaattgcagctggctgcggtgcttgattttattttatttttgcattcttcgaggtaaagtttatggtccacagggagtaattttatgctaaatcacatgcaaatttgctttacttttgaaaataaatgccttcaatgctacctggtttaaaatctatagcaaaaacctgcctgcttcatgcttgcaaactacctaaacagtgagcattatctgtccgtctgtccactgcagtttgctttcagtcccaaccctggagccagagttggtggactcctttgcaaaaggaggtgttcagagtcccatttgcttgctttggctctatttcccctttcaagggcctctatggagtttctgtaaaacccctacatctcaaagagatgcagtctggcagtctcagttaaactattacctctgaaatctcctggaagtgcaatcctggaagctattctagagttgccactcaataacctttgttcccccaatttggctttgggtagtcaatgttatgagggagctgtgttttacaacagtgaggcgtaggacagggctgtttctatgaggagcaatactttgaattactagtgagaaagagctctcctattaggatgggagaccctgggtatcaaggagccagaatacctgatggcggagggtccaacatcttacctagacctaactttcagtcgtcctcaccatttcccattatataattcagacccaggtctatctacatgccttatccttattcttgtttggagtgattaacttggtacaatagcatcttcaaagtcagctgggatggggcttttgttaatccagccaaatggagaggcttttaagaagcagtcagcaaagagacaatagcaatggccataatgatccttgtatgtgaatagtgctttttaaaaatctttattacttattatttattatttttatggatacataataagtatgtatatttatggggtacatgagatatgatgatacaggcaatatgatacgtaataatcacatcaagataaatggggtatccattacctcaagcatttatcctttgtgttacaaacaatccaattatattctttcagttattttaaaatgtgcaattaaatttttattgactatggtcaccctgttatgctatcaaatgctaggtcttattcattttttttcttttatttctttatttatttttaacttttatttgaggttcaggggtacatgtgaagatttgttatataggtaaactgatgtcacaggggtttattgtacagattatttcatcactcgggtactaaacagtacccaatagttattttttgtgattctctccctcctcccaccctctattctcaagtaggcatcagtgtctgttgctcccctctttgtgtccacaagttctcatcatttagctcccatttagaagtgagaacatacaatatttggttttctgttcctcttagtttgccaaggataatggcctccagctccgtcgtgttcctgagaaacacatgatcttgttcttttttatggctgcatagtattccattatctgtgtgtgtgtgtgtgtgtgtgtgtgtgtgtgtgtgtatgtgtgtgtgtatgtgtatatatatatatatatatatatataaagctcttaagtttaattagatccatttgtcaatttttcttttgttgccaattgcttttgatgtttttgtcatgaaatctttgcccatgctgatgtcctgaatggtattgcctaggtcatcttccaaagtttttatagtttggggcttaacatttaagtccttaatccatcatgagttggtttttctatatggtgtatggaagcggtccagtttaaatcttctgcttatgactagccagttgtcccagcatgatttattgaatagatagtcctttccccattgcttgtttttgtcagcttcattgaaaatcggatggttataggtgtgcggccttgtttctgggctctctattctgttccattggtctatgtgcctgtttctgtatcattaccacactgttttggttactgtagccttgtagtatactttgaagttgggtagcatgatgcctcctgctttgttctttttgcttaggatagccttgggtatttgggctcttttttggttccatatgaattttaaaatagtctttcctagttctgtgaagaatgtcgttggtattttgatatgaacagcgttgaatctttacattgctttggatagtatcgtcatcttaatgatgttgattcttcctacccatgagcatggaaagtttttccatttgtttgtgtcttctctgatttctttgagcagtgttttgtaattctcattatagagacctttcacctctctggttaggggtattcctaggtattttattctttttgtggcagttgtgaatgggattgcattcctgatttggctttcagcttgactgttgttggtgtataggaatgctagtgatttttgtacattgattttgtatcatgaactttgctgaaagttgtttattggttgaaggagcttttgggctgagactatggtgttttctagatatagaatcaggtcatctgcaaacagggataggttgacttcttctcttctggatgcactttatttctttctattgcctgattactctttgccacgacttctaagactatgttgaataggagtggtgagagagagcatccttgtcttatgctggttttcaaagggaatgcttccagcttttccccattcagtatgatgttggctgtgggtttgtcataggtggctcttattattctgtgatgtgttccttcaatgcctagtttattggagagtttttaacttggaagatatactgaattttattgaaagccttttctggcatcttggaatagcactggtataacttgcatagcacttccatatgatctcatccatcaagcctgtcacaggaaatcaggcagcgatactcatatccattgttttagacaaaaataatttaatgtatattagagcccaaacattaatgtgggtgctttgggttgtagcacaagataattctattattttccttttgcctgtctgtattatacaaatttccaaatgtgagcatataagaattgtagggtttggtttttgggttttgttttgtttttaaagccacagtggataagaaaagtcagcaattgatgaagctgtaatgtctaagatgcacagagtatttacatattctttctgttgtggacaaaaacctcctgacagtgcaacatccaccattcagacacttctgagatatgacttttaaaagtgctacagccattcctgcaatttccttcacctccctctcctcacccactccctttttcccttttcccagcccatctcttggtcagagtcctgaaaagacaggctcaaatcccagttctgcgatgacttgtcgccttaagcaagtcgtttcccagctctcagccttaattcctcctctgcaaaatgggaagtatgactttcctcacaaggacatagccacagtaagtgaagccctcagaagatggatattcccaggattctcccatgtctgcccttggatctagcagacttagttccgtaataccatgaagataatttgaggttaagggtgaattttattttacagaatgaaanttgaggccctgagaagttaaggtcttgtaccaggtctcaccagcttacaaatggtaggaccagagccacaactcagggcttgagcctgctctcctcaccactctagcacacaaatctttgatttgttattggaaaatttcacctacccataccttctgttgacatctaatcaaatgtgtttattatctatctcacctcttttttctcatccccatcgtcacttcctccaggcatttatgtttgaatcatctttaagtctggcggtcacaaagtggggactcaaggcctccaggtgtttggatgagaactaccacaagtgctgggagccactcaagagccacttcactcccaactccaggaacccagcagaacctaattgagactggaacattgctaccataattaagagtagatttgtgaagattcttcttcagaatctcatgctttctggtagtattggaggagggggttggttaaaatgaaaattcacttttcatagtcaagtaactcagaacttttatggaaacgcatttgcaaagttctatggctgtcaccttaattactcaataaacttgctggtgttctgtggacgtagtgattggtcataancaagtcttgatgagacaaacctggcaggtcaggtcagtcttgctaagattgaaccaaggcccagggccctttgccttgtggttggcctgaatgccttcattctaggagcacaagtccaggcatatactaggtatcacaaaaccaggccataaggccaaacgttaanaccatgaactgaaactgggaggtntggcaaacctcttaggatccaatccatacatggggaaatttaggggatcatgaatgccccaaatatccacctttcaatcgatnaagaaccgggccaataggctgtctaatcctggtagtcgcttnccaccaatatga

SEQ ID NO: 110 - DNA, 1875 bp, Homo sapiens
tgagtgctaaagcttccaacaagactgatgctagctcgtgtcaccaggaagatgctacgtcatgccaagtgttttcagcgcctagcaatttttggttctgtgagggcactgcataaagataatagaacagcaacccctcagaatttctccaactatgaatccatgaaacaggacttcaaactggggattccagagtatttcaactttgctaaagatgtcctggaccaatggactgataaggaaaaggctggaaagaaaccttcaaatccagccttctggtggatcaacagaaatggagaagagatgcgatggagttttgaggaactgggatctctgtccagaaaatttgccaatatactttcagaagcctgttccctacaaagaggagatcgggtaattctgattctgcccagggtcccgagatggtggcttgcaaatgtggcctgtctgcgaacagggacagttttaattccaggaaccactcagctgacccagaaagacattctctacagactacaatcttcaaaagcaaactgcattatcaccaatgatgttttagccccagcagtagacgctgttgcatccaaatgtgaaaatctgcactccaagctgattgtatcagagaactccagagaggggtgggggaacctcaaggagttgatgaaacatgccagtgacagccacacctgtgtgaagacaaaacacaatgagatcatggccatattctttaccagtgcaacaagtggatatccgaaaatgtctgcacacacccacagcagttttggtttaggtttatctgtaaatggaaggttctggctagatttgacaccctcagatgtgatgtggaatacctcagatacgggctgggcaaagtctgcatggagtagtgttttttctccgtggatccagggagcatgtgtattcacacaccatttaccccgttttgagccgacttctatcttgcaaacactctccaagtaccccatcacagtcttctgttcagcaccaactgtataccgaatgcttgtacagaatgatataaccagctataagtttaaaagcttaaagcactgtgtgagtgctggggaaccaattacccctgacgtgactgaaaaatggagaaacaagacgggcctggatatctacgaaggatatggacagactgaaacggtgctaatctgtggaaattttaagggaatgaaaattaaacctggctcaatgggaaaaccttctcctgctttcgatgttaagattgtagatgtaaatggcaatgttctacctcctggacaagaaggagatattggcattcaagttctacccaaccgaccatttggcctttttactcattacgtagataatccttcaaaaacagcttcaactctacgaggcaatttctatatcactggggacagagcatatatggataaagatgggtatttctggtttgttgcaagagcagatgatgtcatattatcctctggctatcgaattggaccatttgaggtagaaaatgccctgaatgaacacccttcagttgcagagtcagctgttgtcagcagcccagaccccatcagaggagaggtagtaaaggcttttgtcgttctaaatcctgattacaagtcacatgatcaagaacaactaataaaggagattcaggagcatgttaaaaaaactacagcaccttacaaatatcccagaaaggtagaatttattcaagagctgccaaagactgtcagtgggaagacaaaaagaaatgaactgaggaagaaagaatggaagacaatttaaagttgtttcattaattaccatatctataaacaaacatagtatctgtcaatctctagagcggccgccaccgcggtggagctccaattc

SEQ ID NO: 111 - DNA, 2226 bp, Homo sapiens
aagcttaatgatttatgggtgattagctgcaagaatgcaagcacagaagacacaaacctttatgccttggaaatttgtcacaagccaaccagttgttttccatccctgtgaagcaggaataattggaggtctgacagaagaacttcccagttaccagaaggagcagcactcatgttctctcttagttttgtgtgaggtgttgcccctgccttggtcaacagtttgagtcagagagatgggggccgggcacaaatccccaccagacgttcccattcacagaccctgtgggggctgggagacgccctggggcaagcagccctggggtaaccaagggaacaaacacggaaaaccaggacgtcagtccttatctggagctcattaaatggggaacattagtcagctgtgaaggccaagatagggtgataggcctgtgggtgggctgggatggggcatgggggcagaggccgccatggaggagaagaggtattggcctcaacgaactccacctccccgccacgtgcccagatccgggatggaaggaccctataaatgcccacaacccagcctccccagaggccttgagaaagagagcgatagagtgcgagagcgagtgcccggagcatcctggccctgagacagctgggccagccccgcagggctctgcagcatgtgggagctccgctccatagccttctccagggctgtgttcgcagagttcctggccacactcctcttcgtcttctttggcctcggctctgccctcaactggccacaggccctgccctctgtgctacagattgccatggcgtttggcttgggtattggcaccctggtacaggctctgggccacataagcggggcccacatcaaccctgccgtgactgtggcctgcctggtgggctgccacgtctccgttctccgagccgccttctacgtggctgcccagctgctgggggctgtggccggagccgctctgctccatgagatcacgccagcagacatccgcggggacctggctgtcaatgctgtgagtagccacaactttgccatccacaaggggtgcccctaccccggccctcttctctgtcccccagctcagcaacagcacgacggctggccaggcggtgactgtggagctcttcctgacactgcagctggtgctctgcatcttcgcctccaccgatgagcgccgcggagagaacccgggcacccctgctctctccataggcttctccgtggccctgggccacctccttggggtaggtcatggccatgggttccagcctcccttcccttctctctttgattgccctcctcccactgcagatccattacaccggctgctctatgaatcctgcccgctccctggctccagctgtcgtcactggcaaatttgatgaccactgggtaatggctgaaaccccctgccctccccgccaagccgccctctccgctcgcccccaggtcttctggatcggacccctggtgggcgccatcctgggctccctcctctacaactacgtgctgtttccgccagccaagagcctgtcggagcgcctggcagtgctgaagggcctggagccggacaccgattgggaggagcgcgaggtgcgacggcggcagtcggtggagctgcactcgccgcagagcctgccacggggtaccaaggcctgagggccgccagcccgtgctaaggccccgacggacgcttgtgaggcccgaggcagaagggccaccccgtccctcctctcccgcagtctgaagttggccccagcgcagagtagctgcttcctggacgtgcgcgcccaggccagtgctgtgagcaggcggggaggaggctgccggaggagcctgagcctggcaggttcccctgccctgaggctgtgagcagctagtggtggcttctcctgcctttttcagggaactgggaaacttaggggactgagctggggagggaggcaggtgggtggtaagagggaaactctggagagcctgcacccaggtactgagtggggagtgtacagaccctgccttgggggttctgggaatgatgcaactggttttactagtgtgcaagtgtgttcatccccaagttctcttttgtcctcacatgcagagttgtgcatgcccctgagtgtgaacaggtttgcctacgttggtgcaagtgtgcatggctggggacttctcacttccccttgcaccccttcctccccaacctgcaataaa

SEQ ID NO: 112 - DNA, 4565 bp, Homo sapiens
gaattccgggcagcatcatcaaggcacatagattctctctttgaacaatgcagctgctgcaggggatggggaagggatggcactggcaattcaagactgcctttcctacttcttcagtgcctctttcaccaatatgaagttaaaaccaggatccttcaaaccaaaaatgtggtggaagaaagaaaaccgtgtctttcagcagcatgccatcggaaaagaaaattagcagtgcaaatgactgcatcagcttcatgcaagctggctgtgagttgaagaaagtccggccaaattctcgcatttacaaccgttttttcactctggacacagaccttcaagctcttcgctgggaaccttcaaagaaagacctcgagaaagccaagcttgatatttctgccataaaagagatcagactggggaaaaacacggaaacatttacaaacaatggccttgctgaccagatctgtgaggactgtgccttttccatactccacggggaaaactatgagtctctggacctagttgccaattcagcagatgtggcaaacatctgggtgtctgggttacggtacctggtttctcgaagtaagcagcctcttgattttatggagggcaaccagaacacaccacggttcatgtggttgaaaacagtgtttgaagcagcagatgttgatgggaatgggattatgttggaagacacctctgtagagttaataaaacaactcaaccctactctgaaggaagccaagatcaggttaaagtttaaagaaatccagaagagcaaggaaaaactaaccacccgcgtgaccgaagaggaattttgtgaagctttttgtgaactttgcaccaggccagaagtgtatttcttacttgtacagatatctaaaaacaaagaatatttggatgccaatgatctcatgctctttttagaagctgagcaaggagtcacccatatcaccgaggatatatgcttagacatcataaggagatacgaactttctgaagagggacgtcaaaaagggtttcttgcaattgatggctttacccagtatttattgtcatcagaatgtgacatttttgatcctgagcaaaagaaggttgcccaagatatgacccagccattatctcactactatatcaatgcctctcataacacctatctaatagaagaccagttcagggggccagctgacatcaatgggtacattagagctttgaaaatgggctgtcgaagcgttgaactcgatgtaagtgatggttcagataatgaaccaatcctttgtaatcgaaataacatgacaacccatgtttcctttcgaagtgtcatagaggtaataaataaatttgcctttgttgcttctgaatacccactcattctttgcttgggaaatcactgctccttgccgcagcagaaggtaatggctcaacagatgaaaaaggtctttggcaataaactctatactgaagcacctttgccctcagaatcctacctcccatcaccagaaaaattaaaaagaatgatcattgtgaaaggaaagaagttgccttctgatccagatgtgttagaaggagaagtaacagatgaagatgaagaagctcaaatgtctcgaaggatgtcggtagattacaatggtgagcagaagcaaatccgactctgtagggagctctctgatttggtgtctatttgtaaatctgttcaatacagggattttgaactatctatgaaaagccaaaactattgggaaatgtgttcatttagtgaaacagaggccagccgcattgcaaatgagtacccagaggattttgttaattataataagaagttcttatcaagaatctatccaagtgccatgaggatcgattccagtaacttgaatccacaggacttttggaattgtggctgtcagattgtagcaatgaattttcagactccgggtccaatgatggaccttcacacgggctggtttcttcaaaacgggggatgtggttatgttctaaggccgtctataatgcgagatgaagtttcttacttcagcgcaaatacaaagggcattctacctggggtgtctcctctagctcttcatatcaagatcatcagtggtcagaatttcccaaagcccaagggagcttgtgccaaaggggatgtcatagatccctatgtttgtatagagatacacggaattccagcggattgttcggaacaaagaactaaaactgtacagcaaaacagtgataatcctatttttgatgaaacttttgagttccaagtaaacctacctgagctggccatgatccgttttgttgttctggatgatgactacattggggatgagtttatagggcaatatacgataccatttgaatgtttgcagcctggatatcggcatgttcccctgcgttcttttgtgggtgacatcatggagcacgtaaccctttttgtccacatagcaataactaatcgaagtggaggaggaaaggcacagaagcgcagtctttcagtgagaatggggaagaaagttcgggaatataccatgctcaggaatatcggtcttaaaaccattgatgacatctttaaaatagcggttcatccattacgagaagccatagatatgagagaaaatatgcagaatgcaatcgtgtctattaaggaactatgtggactccctccaattgccagtctgaagcagtgcctgttaactctgtcatctcggctcatcaccagtgacaatactccttcagtctcacttgtgatgaaagacagctttccttacctggagcctctgggtgcaattccagatgtgcagaaaaagatgctgactgcttatgatctgatgattcaagagagccggtttctcatagaaatggcggacacagtccaggaaaagattgtacagtgtcagaaagcagggatggagttccatgaagaacttcataatttgggggcaaaagaaggcttgaagggaagaaaactcaacaaagcaactgagagctttgcttggaacattacagtattgaagggccaaggagatctgttgaagaatgccaagaatgaagctatagaaaacatgaagcagatccagctggcatgcctgtcctgtggactgagtaaagcccccagcagcagtgctgaggccaagagcaagcgcagcctggaagccatagaggagaaggaaagtagtgaggagaatgggaagctgtgactctgggcattatcgacacgttcacccatcttatcaaggactctggtttctcattcttgttttctttctttaaatgttttataagttcacaaaatggtgccctatatggggtattggacatagatattttcacaatgtcagtatttcagtgtagttaatttatctaaattaaagcctttagtatcagtgttttaaattctgagacatgtgtcaacacccctgtgtggatgcctgtggaagagtgtgtgtgtgtgtgtgtgtgtgtgtgtgtgtgtgtgtggcagagagagagaaagagagagagagaaattctgttaaaatctattctgtgttgcattattcatttagtgagttattccttgatcattttgggacaattgttttaatctgaaattctaaagagcacttactgtaacctgttgctgtgtttaatttgacttctctgcctttgacatttaatttagtgatcttagcatagcttattattgaaggaagccaaatttatcaaagcatacatgttttggtagattaaatatagattagaaaaattcctaagaatcagagtagaaataaaagtgaatgaaagattaaacagatgatgagaatttctaaaaagattagcaaggtcatttcttcagtcagaaaactttaaaaaatatttattaaataaaatcaatttttaggaagttttctgtagtcatttactaaacatatgatttcactagaaaagctgatcataagtgaatttatacctacctgtgtggctactctgaaacacactgaaagctctgttgcaattaggatttgatgtgacataatattgttgtataatttcgagatttgtaggaaggtctcattcttccaagctgagagtctagcactcattttctataacagatatggcagcttagaggtgttggctttgtttggatgtaattttaggggtactaaaatttaaaatttaaagataattgttcaacaatatcatatcatcacattgagctgatataaattctgtgggtccgataatatctttgtgataatttaagagctaaccagttaccacacatctatgatataaccctaacacacacagaaagcatacatgcaaaaagaaatgactaattagggtacatttataattgcatctaggtaatttttaccctaatgtcttcataaagtacttgagtgtaatgtttgttacctccaacagaactaaatgttctatggttatgaaagaatatatttatttaaagcattgcttttattttgaaaagcttcttaattaatttgattaacaaatatgctaatttggggaaacctagagaagataattgttgaaattttgcaaatataaacatctcctat

SEQ ID NO: 113 - DNA, 1137 bp, Homo sapiens
gaattccgggcgcggcgtccggggcgagtgacacgcagagctgaagccatggttcatcaggtgctctaccgggcgctggtctccaccaagtggctggcggagtccatcaggactggcaagctggggcccggcctgcgggtgctggacgcgtcctggtactcaccaggcacccgagaggcccgcaaggagtacctcgagcgccacgtacccggcgcctctttctttgacatagaagagtgccgggacacggcgtcgccctacgagatgatgctgcccagcgaggctggcttcgccgagtatgtgggccgcctgggcatcagcaaccacacgcacgtggtggtgtatgatggtgaacacctgggcagcttctatgctccccgggtctggtggatgttccgtgtgtttggccaccgcaccgtatcagtgctcaatggtggcttccggaactggctgaaggagggccacccggtgacatccgagccctcacgcccagaaccggccgtcttcaaagccacactggaccgctccctgctcaagacctacgagcaggtgctggagaaccttgaatctaagaggttccagctggtggattcaaggtctcaagggcggttcctgggcaccgagccggagccggatgcagtaggactggactcgggccatatccgtggtgccgtcaacatgcctttcatggacttcctgactgaggatggcttcgagaagggcccagaagagctccgtgctctgttccagaccaagaaggtggatctctcgcagcctctcattgccacgtgccgcaagggagtcaccgcctgccacgtggccttggctgcctacctctgcggcaagcctgatgtggccgtgtacgatggctcctggtccgagtggtttcgccgggcccccccagagagccgtgtgtcccagggaaagtctgagaaggcctgagccgtgacctcttctgcttactgtaactgcggccggtttagtgaccccatgacttacagccggttcttacctcttaggtgaaggagatgacatgttttttagaattgctgtgcaaggctcaccctctctctgtcaacactggaataaactttgccttttctgaaaaaaaaaaaaaaaaaaaaaaaaccggaattc

SEQ ID NO: 114 - DNA, 1238 bp, Homo sapiens
agactgaggttagaaggcacaggtggcgagatgagccgggtaccagcgttcctgagcgcggccgaggtggaggaacacctccgcagctccagcctcctcatcccgcctctagagacggccctggccaacttctccagcggtcccgaaggaggggtcatgcagcccgtgcgcaccgtggtgccggtgaccaagcacaggggctacctgggggtcatgcccgcctacagtgctgcagaggatgcactgaccaccaagttggtcaccttctacgaggaccgcggcatcacctcggtcgtcccttcccaccaggctactgtgctactctttgagcccagcaatggcaccctgctggcggtcatggatggaaatgtcataactgcaaagagaacagctgcagtttctgccattgccaccaagtttctgaaacctcccagcagtgaagtgctgtgcatccttggggctggggtccaggcctacagccattatgagatcttcacagagcagttctcctttaaggaggtgaggatatggaaccgcaccaaagaaaatgcagagaagtttgcagacacagtgcaaggagaggtacgggtctgttcttcggtccaggaggctgtggcaggtgcagatgtgatcatcacagtcaccctggcaacagagcccattttgtttggtgaatgggtgaagccaggggctcacatcaatgctgttggagccagcagacctgactggagagaactggatgatgagctcatgaaagaagctgtgctgtacgtggattcccaggaggctgccctgaaggagtctggagatgtcctgctgtcaggggccgagatctttgctgagctgggagaagtgattaagggagtgaaaccagcccactgtgagaagaccacggtgttcaagtctttgggaatggcagtggaagacacagttgcagccaaactcatctatgattcctggtcatctggtaaataaaacaaaggaacttgatgttgagatggatgcttgaggaatattgctgctggttctcataatttctagagtaaatgagggagtccagtccccagtgaactctccttttgtgcttatcatgttttaccttaaatgctgagatcctcatttatgtttgtagttggaaagcaaagctaggtagccatttcttctgttctaccaagttataatagcattcatttccctttatatttccctgaaataaagcacattccaattgtgcagtg

SEQ ID NO: 115 - DNA, 1834 bp, Homo sapiens
agacggtgctggtgactcgtccacactgctcgcttcggatactccaggcgtctcccgttgcggccgctccctgccttagaggccagccttggacacttgctgcccctttccagcccggattctgggatccttccctctgagccaacatctgggtcctgccttcgacaccaccccaaggcttcctaccttgcgtgcctggagtctgccccaggggcccttgtcctggccatggcccagaagggggtcctggggcctgggcagctgggggctgtggccattctgctctatcttggattactccggtcggggacaggagcggaaggggcagaagctccctgcggtgtggccccccaagcacgcatcacaggtggcagcagtgcagtcgccggtcagtggccctggcaggtcagcatcacctatgaaggcgtccatgtgtgtggtggctctctcgtgtctgagcagtgggtgctgtcagctgctcactgcttccccagcgagcaccacaaggaagcctatgaggtcaagctgggggcccaccagctagactcctactccgaggacgccaaggtcagcaccctgaaggacatcatcccccaccccagctacctccaggagggctcccagggcgacattgcactcctccaactcagcagacccatcaccttctcccgctacatccggcccatctgcctccctgcagccaacgcctccttccccaacggcctccactgcactgtcactggctggggtcatgtggccccctcagtgagcctcctgacgcccaagccactgcagcaactcgaggtgcctctgatcagtcgtgagacgtgtaactgcctgtacaacatcgacgccaagcctgaggagccgcactttgtccaagaggacatggtgtgtgctggctatgtggaggggggcaaggacgcctgccagggtgactctgggggcccactctcctgccctgtggagggtctctggtacctgacgggcattgtgagctggggagatgcctgtggggcccgcaacaggcctggtgtgtacactctggcctccagctatgcctcctggatccaaagcaaggtgacagaactccagcctcgtgtggtgccccaaacccaggagtcccagcccgacagcaacctctgtggcagccacctggccttcagctctgccccagcccagggcttgctgaggcccatccttttcctgcctctgggcctggctctgggcctcctctccccatggctcagcgagcactgagctggccctacttccaggatggatgcatcacactcaaggacaggagcctggtccttccctgatggcctttggacccagggcctgacttgagccactccttccttcaggactctgcgggaggctggggccccatcttgatctttgagcccattcttctgggtgtgctttttgggaccatcactgagagtcaggagttttactgcctgtagcaatggccagagcctctggcccctcacccaccatggaccagcccattggccgagctcctggggagctcctgggacccttggctatgaaaatgagccctggctcccacctgtttctggaagactgctcccggcccgcctgcccagactgatgagcacatctctctgccctctccctgtgttctgggctggggccacctttgtgcagcttcgaggacaggaaaggccccaatcttgcccactggccgctgagcgcccccgagccctgactcctggactccggaggactgagcccccaccggaactgggctggcgcttggatctggggtgggagtaacagggcagaaatgattaaaatgtttgagcac

SEQ ID NO: 116 - DNA, 2518 bp, Homo sapiens
ccagcagtggctgcaccatgcacgtgaacggcaaagtggcgctggtgaccggcgcggctcagggcataggcagagcctttgcagaggcgctgctgcttaagggcgccaaggtagcgctggtggattggaatcttgaagcaggtgtacagtgtaaagctgccctgcatgagcaatttgaacctcagaagactctgttcatccagtgcgatgtggctgaccagcaacaactgagagacacttttagaaaagttgtagaccactttggaagactggacattttggtcaataatgctggagtgaataatgagaaaaactgggaaaaaactctgcaaattaatttggtttctgttatcagtggaacctatcttggtttggattacatgagtaagcaaaatggaggtgaaggcggcatcattatcaatatgtcatctttagcaggactcatgcccgttgcacagcagccggtttattgtgcttcaaagcatggcatagttggattcacacgctcagcagcgttggctgctaatcttatgaacagtggtgtgagactgaatgccatttgtccaggctttgttaacacagccatccttgaatcaattgaaaaagaagaaaacatgggacaatatatagaatataaggatcatatcaaggatatgattaaatactatggaattttggacccaccattgattgccaatggattgataacactcattgaagatgatgctttaaatggtgctattatgaagatcacaacttctaagggaattcattttcaagactatgatacaactccatttcaagcaaaaacccaatgaacagcttatgtgttagccatagctgaaaataagcacaaatagcttatattcagatcctatcttcatttgaatatagcttttaaatgaaatgttacagtttgaagttttccttcatgcacttggtgataaacgttttctaaatttttagttaagtatatggataaaaagttatgaactattaaaaatgtgatgtggaccaaaggctaggttgtaatcttgatagtctaaaaaatgatcaaaacaaatgattttcaaggaatattcaatattctgcctttcagaaagtgtatttatatctgtgcttcataaatattaatgttcttcagaacatcattttaaaggagatacttgaattgttatttaaatcaaaccagatgtaaaacactcacatacaagttcatactttaaaagaggaaagctacttaacaatgacaaatatttcacaataataatttttacttatataccatctttcaactgaacatttcagttcttccaagagcttcttagagtagtatattttgggggcagtcaaggaataaactacagtgtaaacatatcccagatgaaaactgctgtatggaaaaatgacagaaagtaactgattgacactgttgattcacagttcagcctcctatctgggaaagacatttctttcctctgctcactttaagaacttttaccgactccaaaaatctcaggaattaaacttttaacagttacagcaataaagaatagttagtactccaaaaatattatatttaagatgctcaacaagaaaaaaatgcaaatgtaatatttttttcaaattacttctttattgacttgtccaaatttcaaaagtgcctacccttcaataaaacttttttattctgatctccataaattacttagtcttctatgtatagctatcaaggaaataaaaccaattttgccacagccacaactgtaaatgtttttgtacccatgctgaaactcataacaacacagacataaaaatagctgtgaggttttgctttttttgttgtcagctatcttaagaatcattaaatacacctgctttgggtaaaactctttgcaagcagtaattaacactagtaacagtgaaagcacaagatttccaaatcagtcgttttctcaaaaaaatatcgtataagtgactcatcctgtctgctaactccagacctcccagcttgaagccaaatctttccatgtgagattgatatggatttcctagaagtactggaatgttgtcatatcttgccctattttaattctgctatagaaaacaattgccttcacttttaaggagtaatttgaatattaataactctggtctagattttcatataatgtattaaagacaaagtagtgaacatcaatgaacatctgatagagataaactgtaatcaggcataagcttgtttgtatgttctggcagtgactaatcagtaaatgatgtcggtttgcccagtatcacttatcttctgtatttttcctctgtcgtgtaaatagtataaccttttcatttatggacaattttttggactagtagccttcaatatacattctgctttgaattaattttttcaaatcaataaattatgtagacatttaaaatcaaatatcaagtagaattgaaaaatgtgagttacataagttaaaaacttactttaaatcttaccttctataggtagctc

SEQ ID NO: 117 - DNA, 2482 bp, Homo sapiens
ttctgtttagatctcactgatgaaaaggcctccaggtttttcacctttccgatcatcacgaataggggaaataaaagaagaaacaactgtaagtccaccccacacttccatggcacctgcacaagatgaagagcgggattcaggaaaagaacaagggcatactcgtagacatgactggggccatgaaaaacaaagaaaacataatcttggccatggccataaacatgaacgtgaccaagggcatgggcaccaaagaggacatggccttggccatggacacgaacaacagcatggtcttggtcatggacataagttcaaacttgatgatgatcttgaacaccaagggggccatgtccttgaccatggacataagcataagcatggtcatggccacggaaaacataaaaataaaggcaaaaagaatggaaagcacaatggttggaaaacagagcatttggcaagctcttctgaagacagtactacaccttctgcacagacacaagagaagacagaagggccaacacccatcccttccctagccaagccaggtgtaacagttaccttttctgactttcaggactctgatctcattgcaactatgatgcctcctatatcaccagctcccatacagagtgatgacgattggatccctgatatccagatagacccaaatggcctttcatttaacccaatatcagattttccagacacgacctccccaaaatgtcctggacgcccctggaagtcagttagtgaaattaatccaaccacacaaatgaaagaatcttattatttcgatctcactgatggcctttcttaatttaagtggctatgggtatttctttcatactttattaaagtatcaatatccctctctccattgtccagatgaaaatatcctgatataatgcaccaaaaaccatgcagcttcggaacagtctaaagagaagtggtgagactcccagtggagacaccatcagtctccacggactgcataaaattgtgtgccacaattctaactcttttctgaatcttcttcccaagttttctaaactagcacagtaaacagacaaactaatgtgccgtatggcctgctgcaattggcttctctgataacaaatatgtaccttacaacatatgtcatgaatttgcatacaaagattcttgtcattcttaataaactgtggcacttggtatttgaatgtgtgtgaaaataagggaagtcaagagattaaatgctgaacttattaatggaatagaaataataaggaggctgaggctggagaattgcttgaacccgggaggcggaggttgcagtgagccgagatcgtgccactgcgctccagcctgggcatcagagcaagattctgtctcagaaaaaaagaaaaaaaaagaaataataagaaaaacttccagatttcaaagtaacaagaaagaagacaggttggccaaagggaggaaaggggggacataaattaattgactttctattcccaaaatgggctagttatatcaaataaatactcccactgccctttctgagtgagagtgtttctcataagtcaaaaatttctgtctactcattaactactctttgcaacaggctttcatatagaagtattctgtttatttttgctgagcctagattgagtaattcttagtttacagaagctccgagcttaatgataaggatgaaaagcagagggagcaatatagaagcaggcttgctaataaaactttttaaataattgacaagggaatattatggaatgtgatgcaaagtttgttccgaaattttatgaggaaattactctctagtctcactttatagtctttttgctatgactttgaagaccattgatttttgagaagcagaataataggattgcctttcattgccctatagtgcaaagaaggtatatgctttataaccaatgttgtacttttgcctagaaaaacaagatatggctttaaatagctacaatcatctttggatgtatatgtcactgctgcttcaagttattggatgcatttgaacctctgagtttctctttcattttaaatattgtctgttcttttaaataaacaaccacagatgtcaggaaaaagtcttaccttgtcaactggttgctccactttttaaaaatgatgaatgataacatcatattaactgcgttttactatacttacagagtcacctaaggtcctgcgagtacaagggtcgacccccaaaggcaggggcagagccagcatctgagagggaggtctcttgaccaatgggcagaatcttcactccaggcacatagccccaaccacctctgccagcaaccttgagaggaaggacaagaagaaagatgggatagaatttaaatagagaagaatgccattttatcactctgcctctgggtgaaataaagatcagtcttgatgttctaactctaattcacagtggtctcctttcagccctacccattctgcagca

SEQ ID NO: 118 - DNA, 1549 bp, Homo sapiens
agaactcggagccagcccggcccgggggaccctgctggccaaggaggtcgtcagtccggtcttgtcttccagacccggagaccgaagcttccggacgacgaggaaccgcccaacatggcctcggagagtgggaagctttggggtggccggtttgtgggtgcagtggaccccatcatggagaagttcaacgcgtccattgcctacgaccggcacctttgggaggtggatgttcaaggcagcaaagcctacagcaggggcctggagaaggcagggctcctcaccaaggccgagatggaccagatactccatggcctagacaaggtggctgaggagtgggcccagggcaccttcaaactgaactccaatgatgaggacatccacacagccaatgagcgccgcctgaaggagctcattggtgcaacggcagggaagctgcacacgggacggagccggaatgaccaggtggtcacagacctcaggctgtggatgcggcagacctgctccacgctctcgggcctcctctgggagctcattaggaccatggtggatcgggcagaggcggaacgtgatgttctcttcccggggtacacccatttgcagagggcccagcccatccgctggagccactggattctgagccacgccgtggcactgacccgagactctgagcggctgctggaggtgcggaagcggatcaatgtcctgcccctggggagtggggccattgcaggcaatcccctgggtgtggaccgagagctgctccgagcagaactcaactttggggccatcactctcaacagcatggatgccactagtgagcgggactttgtggccgagttcctgttctggcgttcgctgtgcatgacccatctcagcaggatggccgaggacctcatcctctactgcaccaaggaattcagcttcgtgcagctctcagatgcctacagcacgggaagcagcctgatgccccagaagaaaaaccccgacagtttggagctgatccggagcaaggctgggcgtgtgtttgggcggtgtgccgggctcctgatgaccctcaagggacttcccagcacctacaacaaagacttacaggaggacaaggaagctgtgtttgaagtgtcagacactatgagtgccgtgctccaggtggccactggcgtcatctctacgctgcagattcaccaagagaacatgggacaggctctcagccccgacatgctggccactgaccttgcctattacctggtccgcaaagggatgccattccgccagcccacgaggctccgggaaagctgtgttcatggccgagaccaagggggtcgccctcaaccagctgtcactgcaggagctgcagaccatcagccccctgttctcgggcgacgtgatctgcgtgtgggactacgggcacagtgtggagcagtatggtgccctgggcggcactgcgcgctccagcgtcgactggcagatcgccaggtgcgggcgctactgcaggcacagcaggcctaggtcctcccacacctgccccctaataaagtgggcgcgagaggag

SEQ ID NO: 119 - DNA, 4656 bp, Homo sapiens
ggccagtttagttgtgctcagtggctatggattgcaacacattggtctaatgaggcctggagattggttcagaagcttttgccaagcaacaaataagaattccttcatcctgcctccctgcagtgtaaatgtgccaaggtcaagtggctctatgactagctttgagtttcacctggtgggacctcttgtccttcaggtcctcgctgctgtctacaaggccctgaatgaccatcatgtttacctggagggcaccctgctaaagcccaacatggtgactgctggacatgcctgcaccaagaagtatactccagaacaagtagctatggccaccgtaacagctctccaccgtactgttcctgcagctgttcctggtaaggccttctttcttctctaactcaaggtcttagccctcattctttggagagccacaagctttctgtttgtccagaaatctgcttctattcatgaaacaaacctctgttatctcacaggcagccagcacttcttctcccacttcagaataccaagcatcccaagtctgcccaaatgcccacaatccatgtatttcttcaacatttcactgccttccttacgtatttaaagcacttatctctagcccaactagcttcagcaaaagcaaactgatttctcagtttgctttaaggcaaattaagcagagaaaagactgagacattacttttctggtaggttcattgcttgctttctcaagcagggtatataaggtgggactaatagagtgaaatggccttctctcctaccaggcatctgctttttgtctggtggcatgagtgaagaggatgccactctcaacctcaatgctatcaacctttgccctctaccaaagccctggaaactaagtttctcttatggacgggccctgcaggccagtgcactggctgcctggggtggcaaggctgcaaacaaggaggcaacccaggaggcttttatgaagcgggccatggtaagatgctgccacctcttatctacttgatgatgttcacatttggggcttgactttccaacacggagaagcattgttttcttcgggccaagaaggtatctaccaatagtgtctattaggcatttgaaaatgtggcagtagaggtcagtatgaggattgaggctagagagaattttgaattatccacactagagtatagttgatgacaggagactgaaggacaatttcaacagaaacacttcagagggaaggagataagaggaccaagaactgaacctaggatactttttattttgggaagatgaagaagagaagcaaccaagaaaagcagcgattatattgtagggtgaaccaagcattctgggaataaagacagaagaatttctttctttcatgtttatttgtttgtttgtttgtttgttttgagatggagtgttactctgtcacccaggctggagtacagtggcacaatctcggctcactgcaacctccacctcctggattcaagcaattcttctgcctcagcctcccaagtagctgggactagaggcatgcgccaccatacctggctaatttctgtatattttagtaaagatggggtttcaccatgttggccaggctggtctcaaactcctgacctcaggtgatctgcccacctcaacctcccaaagtgctgagattacagacatgagccaccacaccagccgggtaaacaatttcaaagggccaataataacatgctatagagagattcaaaagaaaggccaagaaaagaccctgagattggcatttaggagcataccagtgaccctcactgaaacagtttcaataaagaggaaaggaaaggtgcccactcaagaagtttttcagaaaaagacccagaaaggttgccaggagaaatgaggaccaacaaagtttttattcaaataataaccaaaatttttaaaatacgctttatgagccaagaactggggtgaacaaatgagacatagccatgtcctccaggaagcttggagtttagccaaataggagagagcttggcatgtttaaatgtaaagaaagaggagccagaggagacagtaaagatgaggagagtggggataattgagtggagaagaacttagaggagcaggactgcatgagactcaatattaagcataggtggcacagctggtgtaagacaaaaaggagggaagaggcagaaaagagaatacagttggaatcagctctatataagtcaagagatgtagcagttgatgactgattacagttgagggtatctgctgagaatgatgaagaaatggaaatttcaatactgacagtcggaaagcgtagaaaagcagttaaaggaacttgctaggaaattgatcggacgttatggccagacatagccaagcatcaggtaatgtgcagctgaaataagagtgagtgtgtggtagcttcattcctgagttttcctaacagcagtctaaagcatgcaggaagattcagaacgcaaaatagcggggtagaagagtgaaagtttaataggaagatagaagagtgacaaattttaccgatagcctctgttagcttgctgaccatagaggaagctaggcaaggaatcaagagtagtcagaagtgtggtgatgaggccctaaagggaaggaaggccccagggaagctaaatcatcatctcacaggcataagagaggtatcagattttcaaagtagtgctttaccttgactgtggaaagcagggtgcagcagtgctgctgtgtggctgatggactgaggagacctagcttacatgatggagggattgtgaaagcgcaggtcatcagggacatccacacagaagaagggaagctgagtttatcatcaagaatggtgcttcccaagctccagtgtggatctgaatcacctgaaggtgattttggttttgttgttatgatcttttatatttacacacaataattgtatagatctgtggggtatctgtgattttttatatatgcatataatgtataatgatcaaatcaggataattagggtattcactccaaatatttattatttctttgggtttggaacattccaaatcttctcttccagctattttaaaatatgtaataaatcattgttaactatagtcatcttactgttgtatcaaacactagaacttattccttctgcctaactgtatttttgtacccattaccaacctcttttcatttcccctacccccacttgaagcgcttgttaaaaatgcagattatgggtctcacccactgagtttctaattcagtaggtcaggggtaaggccagggaatttctatttttaacatgttcctaagggatgctggtagaccatgaaacacagttggagaaccattgatgtaaaatgtagaaataagtcctggagagaacagacaatagcaacactgactggaagaagtggtaccactgagtgacattcaaatattgtcgtaagtttcataattctgaatttatctttaactggaatgtatacaggaaagcaaatgatactacaataactaaataaaaattacatattcttctagaccaatataggtagaaaatggaaatgtttttaaaataaacatgtttttcttttggtatagtgtactatactagtgagaaatttttcaactttagtttctagtactgttgctgcaatattgttggtactgaacagagatttccccagtaactgacacaaacctcaagcttaccaaagaaatgctcagaaaactgggataaaaaggggagatactttatagaaggggatggtatccccagcaatattcagcaacattgctgtaaaaagaagaaaatctgagtgaaggtttgactggtttcccatgagaggcagacagggtcaaggtggggtcacatttactctaaccagtctcctctctcatatttgtcttctaggctaactgccaggcggccaaaggacagtatgttcacacgggttcttctggggctgcttccacccagtcgctcttcacagcctgctatacctactagggtccaatgcccgccagcctagctccagtgcttctagtaggagggctgaaagggagcaacttttcctctaatcctggaaattcgacacaattagatttgaactgctggaaatacaacacatgttaaatcttaagtacaagggggaaaaaataaatcagttattgaaacataaaaatgaataccaaggacctgatcaaatttcacacagcagtttccttgcaacactttcagctccccatgctccagaatacccacccaagaaaataataggctttaaaacaatatcggctcctcatccaaagaacaactgctgattgaaacacctcattagctgagtgtagagaagtgcatcttatgaaacagtcttagcagtggtaggttgggaaggagatagctgcaaccaaaaaagaaataaatattctataaaccttcagctgctatcgggtttcacttttctgctcttgctgtccaaagactcagtgtatttcattacttttgactctactagacatgactgggtttcaacagtaaaggtcttcaactcttgctagtcattggaatcaagccgcaaaattttaaaaactgagatgctcaggccacaccccagctcaattaaatcagaaaccctagacttgggatcc

SEQ ID NO: 120 - DNA, 2353 bp, Homo sapiens
actaactctacctttctggcttcagggggaggagagttagatcatgcatttgtccgatccatctctgttcacaggacaccagacatcagagacagagagaaaaattcaaagggccaacccgtctttcctttgggcagtagacctgaagtagcgggaagagcagaaaggatggggcagccatctctgacttggatgctgatggtggtggtggcctcttggttcatcacaactgcagccactgacacctcagaagcaagatggtgctctgaatgtcacagcaatgccacctgcacggaggatgaggccgttacgacgtgcacctgtcaggagggcttcaccggcgatggcctgacctgcgtggacctggatgagtgcgccattcctggagctcacaactgctccgccaacagcagctgcgtaaacacgccaggctccttctcctgcgtctgccccgaaggcttccgcctgtcgcccggtctcggctgcacagacgtggatgagtgcgctgagcctgggcttagccactgccacgccctggccacatgtgtcaatgtggtgggcagctacttgtgcgtatgccccgcgggctaccggggggatggatggcactgtgagtgctccccgggctcctgcgggccggggttggactgcgtgcccgagggcgacgcgctcgtgtgcgcggatccgtgtcaggcgcaccgcaccctggacgagtactggcgcagcaccgagtacggggagggctacgcctgcgacacggacctgcgcggctggtaccgcttcgtgggccagggcggtgcgcgcatggccgagacctgcgtgccagtcctgcgctgcaacacggccgcccccatgtggctcaatggcacgcatccgtccagcgacgagggcatcgtgagccgcaaggcctgcgcgcactggagcggccactgctgcctgtgggatgcgtccgtccaggtgaaggcctgtgccggcggctactacgtctacaacctgacagcgccccccgagtgtcacctggcgtactgcacagaccccagctccgtggaggggacgtgtgaggagtgcagtatagacgaggactgcaaatcgaataatggcagatggcactgccagtgcaaacaggacttcaacatcactgatatctccctcctggagcacaggctggaatgtggggccaatgacatgaaggtgtcgctgggcaagtgccagctgaagagtctgggcttcgacaaggtcttcatgtacctgagtgacagccggtgctcgggcttcaatgacagagacaaccgggactgggtgtctgtagtgaccccagcccgggatggcccctgtgggacagtgttgacgaggaatgaaacccatgccacttacagcaacaccctctacctggcagatgagatcatcatccgtgacctcaacatcaaaatcaactttgcatgctcctaccccctggacatgaaagtcagcctgaagaccgccctacagccaatggtcagtgctctaaacatcagagtgggcgggaccggcatgttcaccgtgcggatggcgctcttccagaccccttcctacacgcagccctaccaaggctcctccgtgacactgtccactgaggcttttctctacgtgggcaccatgttggatgggggcgacctgtcccgatttgcactgctcatgaccaactgctatgccacacccagtagcaatgccacggaccccctgaagtacttcatcatccaggacagatgcccacacactagagactcaactatccaagtggtggagaatggggagtcctcccagggccgattttccgtccagatgttccggtttgctggaaactatgacctagtctacctgcactgtgaagtctatctctgtgacaccatgaatgaaaagtgcaagcctacctgctctgggaccagattccgaagtgggagtgtcatagatcaatcccgtgtcctgaacttgggtcccatcacacggaaaggtgtccaggccacagtctcaagggcttttagcagcttggggctcctgaaagtctggctgcctctgcttctctcggccaccttgaccctgacttttcagtgactgacagcggaaagccctgtgctccatggctgccatctcacctcctgctgggcagggggcatgatgcgggccagtgctccagccacagaaaagaaagttcatgctttgttcagcctgccttcttttctcccttttaatcctggctgtcgagaaacagcctgtgtctttaaatgctgctttttctcaaaatgggacttgtgacggtgtacctgaggcccccatctccttaaagagtgtggcaaaataatgatttttaaatctc

SEQ ID NO: 121 - DNA, 1104 bp, Homo sapiens
ctctagagtcgagatccattgtgctctaaagtggatacagaaatctctgcaggcaagttgctccagagcatattgcaggacaagcctgtaacgaatagttaaattcacggcatctggattcctaatccttttccgaaatggcaggtgtgagtgcctgtataaaatattctatgtttaccttcaacttcttgttctggctatgtggtatcttgatcctagcattagcaatatgggtacgagtaagcaatgactctcaagcaatttttggttctgaagatgtaggctctagctcctacgttgctgtggacatattgattgctgtaggtgccatcatcatgattctgggcttcctgggatgctgcggtgctataaaagaaagtcgctgcatgcttctgttgtttttcataggcttgcttctgatcctgctcctgcaggtggcgacaggtatcctaggagctgttttcaaatctaagtctgatcgcattgtgaatgaaactctctatgaaaacacaaagcttttgagcgccacaggggaaagtgaaaaacaattccaggaagccataattgtgtttcaagaagagtttaaatgctgcggtttggtcaatggagctgctgattggggaaataattttcaacactatcctgaattatgtgcctgtctagataagcagagaccatgccaaagctataatggaaaacaagtttacaaagagacctgtatttctttcataaaagacttcttggcaaaaaatttgattatagttattggaatatcatttggactggcagttattgagatactgggtttggtgttttctatggtcctgtattgccagatcgggaacaaatgaatctgtggatgcatcaacctatcgtcagtcaaacccctttaaaatgttgctttggctttgtaaatttaaatatgtaagtgctatataagtcaggagcagctgtctttttaaaatgtctcggctagctagaccacagatatcttctagacatattgaacacatttaagatttgagggatataagggaaaatgatatgaatgtgtatttttactcaaaataaaagtaactgtttaaaaaaaaaaaaaaaaaaaaa

SEQ ID NO: 122 - DNA, 3762 bp, Homo sapiens
cccgcgagcgtccatccatctgtccggccgactgtccagcgaaaggggctccaggccgggcgcacgtcgacccgggggaccgaggccaggagaggggccaagagcgcggctgacccttgcgggccggggcaggggacggtggccgcggccatgcagtcctgtgccagggcgtgggggctgcgcctgggccgcggggtcgggggcggccgccgcctggctgggggatcggggccgtgctgggcgccgcggagccgggacagcagcagtggcggcggggacagcgccgcggctggggcctcgcgcctcctggagcgccttctgcccagacacgacgacttcgctcggaggcacatcggccctggggacaaagaccagagagagatgctgcagaccttggggctggcgagcattgatgaattgatcgagaagacggtccctgccaacatccgtttgaaaagacccttgaaaatggaagaccctgtttgtgaaaatgaaatccttgcaactctgcatgccatttcaagcaaaaaccagatctggagatcgtatattggcatgggctattataactgctcagtgccacagacgattttgcggaacttactggagaactcaggatggatcacccagtatactccataccagcctgaggtgtctcaggggaggctggagagtttactcaactaccagaccatggtgtgtgacatcacaggcctggacatggccaatgcatccctgctggatgaggggactgcagccgcagaggcactgcagctgtgctacagacacaacaagaggaggaaatttctcgttgatccccgttgccacccacagacaatagctgttgtccagactcgagccaaatatactggagtcctcactgagctgaagttaccctgtgaaatggacttcagtggaaaagatgtcagtggagtgttgttccagtacccagacacggaggggaaggtggaagactttacggaactcgtggagagagctcatcagagtgggagcctggcctgctgtgctactgaccttttagctttgtgcatcttgaggccacctggagaatttggggtagacatcgccctgggcagctcccagagatttggagtgccactgggctatgggggaccccatgcagcattttttgctgtccgagaaagcttggtgagaatgatgcctggaagaatggtgggggtaacaagagatgccactgggaaagaagtgtatcgtcttgctcttcaaaccagggagcaacacattcggagagacaaggctaccagcaacatctgtacagctcaggccctcttggcgaatatggctgccatgtttcgaatctaccatggttcccatgggctggagcatattgctaggagggtacataatgccactttgattttgtcagaaggtctcaagcgagcagggcatcaactccagcatgacctgttctttgataccttgaagattcattgtggctgctcagtgaaggaggtcttgggcagggcggctcagcggcagatcaattttcggctttttgaggatggcacacttggtatttctcttgatgaaacagtcaatgaaaaagatctggacgatttgttgtggatctttggttgtgagtcatctgcagaactggttgctgaaagcatgggagaggagtgcagaggtattccagggtctgtgttcaagaggaccagcccgttcctcacccatcaagtgttcaacagctaccactctgaaacaaacattgtccggtacatgaagaaactggaaaataaagacatttcccttgttcacagcatgattccactgggatcctgcaccatgaaactgaacagttcgtctgaactcgcacctatcacatggaaagaatttgcaaacatccacccctttgtgcctctggatcaagctcaaggatatcagcagcttttccgagagcttgagaaggatttgtgtgaactcacaggttatgaccaggtctgtttccagccaaacagcggagcccagggagaatatgctggactggccactatccgagcctacttaaaccagaaaggagaggggcacagaacggtttgcctcattccgaaatcagcacatgggaccaacccagcaagtgcccacatggcaggcatgaagattcagcctgtggaggtggataaatatgggaatatcgatgcagttcacctcaaggccatggtggataagcacaaggagaacctagcagctatcatgattacatacccatccaccaatggggtgtttgaagagaacatcagtgacgtgtgtgacctcatccatcaacatggaggacaggtctacctagacggggcaaatatgaatgctcaggtgggaatctgtcgccctggagacttcgggtctgatgtctcgcacctaaatcttcacaagaccttctgcattccccacggaggaggtggtcctggcatggggcccatcggagtgaagaaacatctcgccccgtttttgcccaatcatcccgtcatttcactaaagcggaatgaggatgcctgtcctgtgggaaccgtcagtgcggccccatggggctccagttccatcttgcccatttcctgggcttatatcaagatgatgggaggcaagggtcttaaacaagccacggaaactgcgatattaaatgccaactacatggccaagcgattagaaacacactacagaattcttttcaggggtgcaagaggttatgtgggtcatgaatttattttggacacgagacccttcaaaaagtctgcaaatattgaggctgtggatgtggccaagagactccaggattatggatttcacgcccctaccatgtcctggcctgtggcagggaccctcatggtggagcccactgagtcggaggacaaggcagagctggacagattctgtgatgccatgatcagcattcggcaggaaattgctgacattgaggagggccgcatcgaccccagggtcaatccgctgaagatgtctccacactccctgacctgcgttacatcttcccactgggaccggccttattccagagaggtggcagcattcccactccccttcatgaaaccagagaacaaattctggccaacgattgcccggattgatgacatatatggagatcagcacctggtttgtacctgcccacccatggaagtttatgagtctccattttctgaacaaaagagggcgtcttcttagtcctctctccctaagtttaaaggactgatttgatgcctctccccagagcatttgataagcaagaaagatttcatctcccaccccagcctcaagtaggagttttatatactgtgtatatctctgtaatctctgtcaaggtaaatgtaaatacagtagctggagggagtcgaagctgatggttggaagacggatttgctttggtattctgcttccacatgtgccagttgcctggattgggagccattttgtgttttgcgtagaaagttttaggaactttaacttttaatgtggcaagtttgcagatgtcatagaggctatcctggagacttaatagacatttttttgttccaaaagagtccatgtggactgtgccatctgtgggaaatcccagggcaaatgtttacattttgtataccctgaagaactctttttcctctaatatgcctaatctgtaatcacatttctgagtgttttcctctttttctgtgtgaggttttttttttttttaatctgcatttattagtattctaataaaagcattttgatcgg

SEQ ID NO: 123 - DNA, 15571 bp, Homo sapiens
aagcttcctcactccttggcacctggctccgacatcacattgacttttcccttcctgcttctaccatcacatcaccttcttctgactccaatctcctgcctctttcttgcaaggatccttgtgattgtaattaggacccagctggataatccatgacaatctcttcaagatccttaacttaatcacatctgcaaagtcccttttgtcatagaacgataacattcacaggttctgggtattaggacacggataacttcggggttccattactcacccataactggtatgcagtgctgatttccatcctgtaggtacggtttagggatctctaggtcaatgagataatggactcttgctcatgttacatggcataatgggaagaaagccaaacctagaaaaagagggactcaggttcccttgttagagcctcttcttactaactgtgggattaggggctgattccctgacctgctgtgttctgtcttctctccaattcaatgggaatgaactgtgagggcactgagcaaaaactaaggtctcaatacctagtagtagtgggacttgcctctggatacccagtagtgatcctgccgcctgtttctggatatcctacagtagcaatcccacctgtttctggatatcctacagtagtgatcctgcctgtttctggatatcctacagtagcaatcccgcctgtttctggatatcctacagtagtgatcctgcctgcttctggatacccagaagtgatcatgcctggttctagatacccagtagtgattgtgtttcctctagatacccagtaggtattgtgcttgcttctagagatgtagtagtagctggacttagctctagatacccagtgctcatctctagactgggctgagatcagtgtctcccttgaagggttattgtaaggatgaaaaaagataatgcgtttaaagcacttggtgtagtaggtggtctttttaaaagtgtgaataaatactagttcttattatttctgtggatatccaacagccacataattgggccccaaagccatgaagaaggaagaggaaatgtcttaaaggttgtcgatggacagtgtttgctgaacatcaaaatcactttccaggtattacctctgatttgctctaccaactccacaccccacctgcagccacataaccttccatgatcacggccatgcacaacacaccatgtcccccaggcaaggggaccttagaaacataaccaggcttgagacagcactctgcaccggtgtcttggaaatgctcttaagagtgtatggctgagttagggaaccaggatttcaaagtagaaagggagaatctacccaagcccatagaaatcctgaatccactcctttctcagcaacaagcactggcctgggagtcagccacttatgcaccaaccccactctgcccctaattaaatgcatgactttgaaaattcccctcattcttctgagccccaattcagtgattggtgcaatcacaggcttggctacagtgacccattcattgcaggcatggtgagactctcaatccctctcatttccactagaatctaactgttgggatctatgacccagtcagcatagcaggcctgtggggagctctcaggttcaagcatatgccccccctaatctacaagaaattagctgcagaaaaccaaggaatagaacctggaaaaagagagggtttgctagagctgtccctttccctgtctctggaatgccaacaatagggaggctctttggtcttgtctctcaggagtgcccatgccattccaggaaaatgatggcccagctggtggtgtaaggcttggggggcagcgagtgggcatcgtggtgaaagcctcgggatcagggagctgcgtctgcaggcaggcctgctggccggaaacctgccaggaaaggaaggggctgtctcggggcggggccagggaggggtggagacagggccggctgtggtcagtgacaaatgctggctgcaatccagccagccctctgccctttctgagcccgagggactgccacctccactgtgtgcacactcagctacgggacacagtaagtaccgatgccgcaaagggaggtccccagggcttgagggcatgtgaggcgaggagaggatggactctagagttttggggtttggggtctgcaaagctctgaaggagtctcatctctgcagtttcaggtatccaaggcagcagaggtgagtgggtcccccgagctctgtgaccttatgctccacactaactctggcagagcctccgtttcctcataggtaagatggaaataattacaccctctggatggtgtgactgaagattaaatacagcgggtgctctcactcagcacatctggccatgtctgcagacacatttggttgccacaactggaaggggggtgggggttagtgacatctagaggccagcgatgctgctgatgatcccacaatgcccaggacaagatcacaaagcatcatcctgttcaaaaggtcaacaggatcaaggttgagagaccctgaaataaggccatggggacaaaatgtcggctggataggaggtgctcagtaagtggcagcttctgttgttttctgtgcctggagtcttggggctttagaaatcaggaacaatgatccaatattatcggcttccgtgagataagggcatcttgcctggaggctgccacccaggccggtcatggcagctgctcatgaaggacagtaacaatttggcagtttgttaaatgaacaaaatgtagaaataaagtaagcagaatttttagtttttctgaaggtagggcttttggccagatatgcagcaataaaagagcaaactgcttccttgggccagtgtccttgctcatagatcaggaaaccgaagcatgaagaatacaggcggcagatgcctgaaggtaacggacgtgttcatggtgctgacggtgatgataagtgacagatgtagactcatctccaaacttgtcaggttatagacattaaatatgtgcaactttatgaatagcagtcatgtctcaatcaagtggttttaataaagaaataataggaagccagagctgagagacagggagggagttgttcaaggtcacctggcaagtgagctccggggcggggagagctcagctctgggtggccagcctggctttttccactgctcagtgtccagcttgcagtctaatgtctcgaattacagagaaggagactggtcagttcattcattcattcattctacaaaggtttatggagcatctctcctgactgcaagctcttgaaggtgagagcagcacaaatgagggtcccatggagagagaggccggaatgaaaaatgtcaatgacaaatgcatatataaaggcacatgtgtaattgaaagagctttgagagaaagagtcaagggactgttccagagaatagccatggaaggggaaaaggtccagtgtgataaggtattgcaaagaagtgacatttaagcaaaagcctgcagcctatgcagaagttggcctcagtgagaaaggttgggggagggttccagtagagagggaaggtatgcaaaggcccagagttaggacagaacttgctgtgtttgagaaactgggaaaagaagagtgagcctgggggtatcacgtgatccagggcagagcaggtccaggccaggtgcagccaggtcacagcagccctagtgggttagagcacaaatcaaagtttagcatttatctgaaacacaggagttggccatgagtttcttaggcgaggaagcgctgtgaccatatttatgattgaaggagattcttttatatgctgtatatagaaagcctttcagggcaaagaaaggaagctactggggtagccctgggggagatgaagggagcttccactgggggcagtaagaaagccagggaaaggcggcagctttaagacctgttttggagatagaacggacaagctttgctgatgggctggagtggaacaggaagtcaagattacttcttctgggaagttctgttcctgggtctttaggatctagaggaagctgtgactttgtctctcatctctgcctgggctccaagcctcacatccctttttgtaattagaagatattggacagaccgtcctcactaacacaattcccacagctgagtccagggtagaactgggcaggacttcactgcccaacacgggaaatatcagtcagcagatttgggtttcggggatggtggtgggccagcgggaagactgaccagggcctacccatcacatccccaccacctcccacctcaattcaccttggcctgagatgacaggtgaacatgactgatcctctctcttccctctgcagaaacactaaagccagggaccaggagaggggcagcccaaccaagctttcaaagcactcagtagaggctggtctgggggatgggaggctcccagggcttcacctgtctctgtcaaagccatgtatttccaccagaggcccaagagtgcgatggcaaaccctggatttgaaactaagaaacgtaaaacaagcactgaggactccactgcctcttgagtgacctctctgaccctctgtttcttctgcactgttaggataatgatactaactccatgttgttgtagagaagtataaatgagctaatacaggtgaaccgcctggggataccaggaggtgaggtcgaggaggaacgaggtatcactcctcagagccactcagagagaggctgtgcacgagtcagaggaacctggattttaattccggttccatcactcagtagctgaaacaagctattccacttcacttagcctcagtctattcaatctgtaaaatagagtgagtttacttttggaaaactctgtaaaatagagagcttacttttggtgaaggttaaacatagtaatatttatggagtgtctagtatgtctttaataattagtggttttactgaaaagtagagagagttggcccagagggagcaagatttctgggtctcaaacatgtagcccaggagagcctaagtgaacctggggccctctccaaacagatcctgggggagactcagtgcacacccggagaagcagctcctccccatcggatctctagtgcttggcagggggcggggtcttgagggggtgtccacaacacatggcagactgcagatgaagaaactgaggcccagagggggtgaggcttgcccagggtgacctagtagctgaatagatgggagaatggagccagggcctcactgagactctctggtcagctgcccctgggctgtatccaataaggaaactcccctgcttctgaagctgttctcgaaattatcagctcagtgtgaccctgtggggggttgagccacattgtttctttagaagcatctccatacatggctggttccaacccttggcaggagggaccatattgtgctgtaaaatagactcatttagagaagccggagattaaagcacccacctatgtccttcaaagctctccaggcaagtgccatggtgggaacaggtagggagtgtcagtggggggaagcccagactctgctcactcattatctgcagattagggctattgttggtggctactaagtcagggatttcaaaatcaggaagatgcagccaggaaaagaggaggcaggactctgcagaggaggcaggactctgcagagtcagagtgataaccgagtctgagtccaagctttgccagtgttagcaagcgactccatctctctgaacctcggattacccatctgtaaaatagagctagcagcaagatgtacctttttgggtggtgcagggctgaaggagttggcacagtgcctgaaagagggtgcgggcaatgcgcccaactgctgtggctgctgggtttggtgccaggttcgattctgcaggcagaaacttctacatgaggctccttctcggaaggagctcaggacacaatttggaggctgggctggcaagggtgacctgctggagctattcaacttcacttaaagacaggcctgcagtccaagcctgcccaattcctgagaccattctctctccactgctgagccccacggccactctgcaagggatttcccacccacctgtttggggccctttggagtttggttttaattgggtcacgggatgctgtgacaggctgcccctgcctggtggggatctggggtcactgatgacattgtgcccatggagagagcccagcagaaagggattccctccaaggcgacacacagggcaaagctcacatcagaagccaggcaggccctctgcacctggtaattagccggcccgggtgctgtcaggctcacacgtgtgtgtgtgtgtgtgtgtgtgtgtgtgtgtgtgtgtgtgtaaagcatgtaccctatggtacagttgagaatatggaggcctcagatggggcttttgcagaaactgccatgcctactgctcacacttccatagcacgtgcccccaagcaccccatggtgtaggtgctgttattatcactatcttacagttatggagcagtggctcaaggtgtaactgatttgcccaaaatcacactacaaggacacagcagggctgagatttgaacccaggcagtggcttcagagcctgagctgtttcctactgcagagggaggaggcaagacttctacccgtagccagatggggaggcatgggcacaggaacggctcttgggtgaagtggagggaggaagaggaggactgaaggcgaaggccacgtcaggagtgatgggataccccacaaaggcctccctgagaagcgctagagacaaagatgagtgcctcctcatctggaagatgaaaagatgtctttgcctgcatgggctgccgtcacaaagtcccaggggctagggggcttcaacaacagaaatttctttctttacaactctggaagctggaagtctgagattaaggcaccagcaggatttgttccttccaaggcccctctccttggctcacaggtggctgccttctccctgtcttcacctggtcttccctctgtgcatgtctctatcctgatctcctctttttaatttttgtgtaaggacgtagtcatattgggttggggcccactctagtgacctcattctaactcagtcccctctttaaaagccctatctccagatatagtcacattctggggtattgaaggtaaggacttcagtatatgcattttgggggcacaattcagccagaacaggaggacggtggggatgtccacatgaagaggttcaggcagaattcctttaggaggggaagatgtctctctgtgggacaagggtggcatggagcagcccctgggggaaggagaaggggacagtttgcatactggtattctgcctaccccagggtggacactcactcagcgtttgctgaatgaacagggcaaggccagcagtgctgatggtcccaggcatgtagctggtctgagttcatagaaggaccacagcgccctgccatgtgccaaaccaggacaccagagtgaaggccagaagctcacatggaagcagcttagttccctggtaacctcgagatgctgatgagacagagcagagcagagggaaccctctccctccatatcccatcctccaaaatgtgtcccttgatgtggatgggtagacaggattcctgccctggcagccagacccctgccttgggtctgcacctcctctccctccttcctctccccgtcatccctaaatcttgtcctcgagccactgccaccctgtgtaaaccctcatgtccagtcttgggggtgccatcccttctctttaaagctgaatggaccaaacatacccattgagtgttgggtggggacatctctggaaagtcagcacctggaccagctccacccctctctgaggacaccttctttccctttcagaacaaagaacagccaccatgcagctcttcctcctcttgtgcctggtgcttctcagccctcagggggcctcccttcaccgccaccacccccgggagatgaagaagagagtcgaggacctccatgtaggtgccacggtggcccccagcagcagaagggactttacctttgacctctacagggccttggcttccgctgcccccagccagaacatcttcttctcccctgtgagcatctccatgagcctggccatgctctccctgggggctgggtccagcacaaagatgcagatcctggagggcctgggcctcaacctccagaaaagctcagagaaggagctgcacagaggctttcagcagctccttcaggaactcaaccagcccagagatggcttccagctgagcctcggcaatgcccttttcaccgacctggtggtagacctgcaggacaccttcgtaagtgccatgaagacgctgtacctggcagacactttccccaccaactttagggactctgcaggggccatgaagcagatcaatgattatgtggcaaagcaaacgaagggcaagattgtggacttgcttaagaacctcgatagcaatgcggtcgtgatcatggtgaattacatcttctttaaaggtaaggcccttgggcccaaacctgcactttctttggcttttctgctgcttttatctaaagaatacccaattccctcacatacataaaagacggggagtacgttaagttcttttgggtgcctgttgagaaaaattaagtaaacaagcagccagagaaggtaagatgaatgccttcttgctgtggatgggattagtgaggctgagatgctgtttcctccacggaggaagagctggttgctgtcttcgggcccctggggacatctgaagccccagctttctacaggctctgaagtatgaacccattgtggccaccatggcaaagacaccaacaccttagccactcagggcaggacacagaccccagaagggcttaaagggcatttcccagtcccccgtatccctcagatcttggcccctctgccctcatagaggccaagactccctcagacaaatgcttgttcctctgaaatgcctcctcctgactcctcagcaagagctgacctctgcttatctccccgacactccttgtaagcattcctgctcgcctctgcagctcctgccagttgctgaccctggggaaagcaagagtggatagagaggagaagagaggagaggagagggtgggaagggttgcgaaggaaggtaaattgttaacacctccccttcctatggtcacagatcatgagtatctttggccatttgggtggctataacaaaataccataaactgggtggcttagcaacaacaaacatatatttctcatagttctggaggctgagaagtccaggatcaaggcactggcagatgcagtgcccattccttggttcatagagagtgccttcttagtatatccttgctggaaggaggaaggcagctctctgtggtctcttttgtaaggacaccgatcctgttcatgacagctccacccccatgacctaatcaactcccaaaggccccctgtcctaataccaccaccttgggggttaggtttcaacatatgaacaatgtggggacacaaacattgagaccacagcagtgagtgtcgaacttggactctgagatttcctatcccctggtgcagggcagtccccattacaccagattgctgagggcagctgggaaataagctaaggacggtattgactggggtcttccttcgataacgattaagaagttggaaacaggccaggcatggtggctcacgcctataatcccaacattttaggaggccgagatgggcagatcacctgaggtcaggagttcgagatcagcctggccaacatagtgaaaccccgtctctactaaaaaatacagaaattagccaggcatggtggtgggcgcctgtaattccagctacttgggaggctgaggcaggagaatcacttgaacctgggaggtgggggctgtagtgagccaaaattgcgccactgcactccagcatgggtcacagagcgagactccatctcaaaaagaagaaaaaaagaaaaaaaagaaaaaaagaaataaaataaaataaaaagaagttggaaacaatcacttgtagcgttttgttcagaagttcccataggaaggtcagagaagggtcattgaagacttcccaatgggaaaaaccattcatttccaggatccatactaacttctttctaaaatttaaatcaaaatattggaatgaaagtgcaaacagagaagttcacccagatatcaggtagcattcacagccagccacatttttcaccctcttcacttggagatttggtcttgagtaaaacgttagagaatcagagaacatcagggatccagggcctctgaagatgtgaaaaccaacctccttgttttgcaaatgtggaaggaaaagtcccacgaaaagtccaagaatgtgcccaatgttataaagagacttgccttcatattcaagaggttcaacagtcactgctctggggctgccataaagatggtctccgctggctatctttactgtcttcactccttttatttgcagctgagaatttctaattctgacacaaaattctttttcatttttcccttttttcatctttagctaagtgggagacaagcttcaaccacaaaggcacccaagagcaagacttctacgtgacctcggagactgtggtgcgggtacccatgatgagccgcgaggatcagtatcactacctcctggaccggaacctctcctgcagggtggtgggggtcccctaccaaggcaatgccacggctttgttcattctccccagtgagggaaagatgcagcaggtggagaatggactgagtgagaaaacgctgaggaagtggcttaagatgttcaaaaagaggtactttcagactaccccagggccagcctaaacccacacagccccagggagacacacacgccctaccagggccacacagcactggtgggaaggactcacccagccaaggagctgcctccaggcccagaggcatcctgtgacatccaagtcctgggggcctagcccagttggagggacaagagctggaaactgggttccttagggtggtgccagagtgggcagagacctctgggcagcccacgtccaagtccagagcaaggggaggctcatcctagaaaagaggccagaggagccataaccaccattgttccttgggttaaggagtccttttttaaaaccatcaaaactaagaatccagtgcattatgaatccaaggggtgaggctcagtgtgccaatgccccagaacagtctaagaaagctccttttccctttccaggcagctcgagctttaccttcccaaattctccattgagggctcctatcagctggagaaagtcctccccagtctggggatcagtaacgtcttcacctcccatgctgatctgtccggcatcagcaaccactcaaatatccaggtgtctgaggtgggttcagaagctcctatgcatctgcttcccaagatctattctgttctattctttctattctactctaccccatttcattccattccattccactcaactccactccactccactccactccagttcactctattcaattccactccactccagttcactctattcaattccactccactccactccagttcactctattcagttccactccactccactccactccactccagttcactctattccattccactccattccactcctccactcctctcatccactccactctactcctccactccacatctccactccactcctccactccactcctccactccactcatccactccactcctccactccactcctccactccactcctccactccactccactcatccactccactcttccattccactccattccactcctccactccactcttccactccactccattccactcctccactccactccactctattctattctattccattccattctactctattctattccattccattgcagtcaactccactccactctctactattctattccactcctctcccctccactccattccattgcagtccactccactgcactccactcctttattctgttctgttctattctattctattctattctattctctccctctccctctcttttcccacaagtagtgaaagtttcactttgtgtcttatccttcatgtaatgggaagccatatccaccactgttccttgagttaaggagtcctgttttaaacaatcaaaactaagaaggcacttcctagctatgtgatctccaaaaaatacttgactctctgagcttcctttctctcttctataaaattgaagaattacaccttgctcaaagatgccatgagaattcaatgacagacacatgcgaagtcaccccccagcacagtgcctggggcagagtagctgctccattgttccatttcctacttgctccatggctcagttgaacagatacttagaggttgatgcccataggcagaagctttgccatttgctatgatgacttcacctgcccctggtggcctggtgatgcctggtgtctcccctgcagatggtgcacaaagctgtggtggaggtggacgagtcgggaaccagagcagcggcagccacggggacaatcttcactttcaggtcggcccgcctgaactctcagaggctagtgttcaacaggccctttctgatgttcattgtggataacaacatcctcttccttggcaaagtgaaccgcccctgaggtggggcttctcctgaaatctacaggcctcagggtgggagatgaagggggctatgctatggcccatctgtatgctggtagctagtgatttacacaggtttagttgactaatgaggcattacaaataatattactctatgatgattgcttccacccacacgactgcaacatacaggtgccttggggaaatgtggagaacattcaatcttgccgtcactattcatcaatgaagattagcactgagatccagagaggctggatgacttgctcaagttcaccagcatggtagtggcaaagagaggtccagagtcctggcccttgatgcccagctcagtgccacaaagctcagtaggagggatgttccagtggatgagggccaccaggaagcacaggtccaaggctggtcccacacttatcagcagcaacaactgtcagttcatcctgcatgggaaaaatgttggaatgggagtctgaaatggggctactgtttcagtcctaacgtgctgtgtgacattgggacaacactttccctctctggacctcagtttccctctgtatacaaggatcagattcttgctgtgacccaagaactcctgaaatcatatagaaaggctggggtgggccctgtcattcgtggttgatttcaatacactcaagtgccattcatcctttaagaaaaacatctggatatcaaggtggaaatggcccatttaatgattgattatatcattttgtggatatagttataatctgatgggcctggctgggagtggaagaagggaagccttttgcaaatagtagagtgtcagttgcaggtgccaatgactaactttttgaattctatgttggcattaacaataaagcattttgcaaacactggttataactgtctttatggaggcagctctgggaatggtgacattgatagcttaccatgctccaggccgggtgcctggcccttcacctggatggtcgcatttgcccctcataagactcccatgaagaaaggcaccactattatcccatctgttattcacagatgggaaaggcaaggcttgaagtggttaggtggcttacccagtcacatatcttctaagtggtgcagccagaatttggcggggggagtgcgaccaagaaccctacactcagtcctgtgctctgtgctgtggaggagagatgaccaggagcagaaacttcattcaggggcatctcaggcaccagctcccccatgagccagctaagttccctccctcccttcaccaagcaccatgtgtttcctcatgtgccaaatgaagaggattagatactcaagaatggaatgagtgggtgagtgagtccttcgctgcacccaagtctgattttctgtgcgcctgctcaccccaccctgcatgttctaagcatgcttccataaggctgtgccccaccctctgattctagagtctggactgtatcagaggtgagtgcctactagaggtaacaaggtcaggaccccaaaccttgtccatcccccaaagtactgagcccccaccatgcaccagcccatgccagatgctttgcacttgtgatatcacccatcccttgacaacccagcaagttctattattgttcccattttacaggcaataacataagtgctttcccagggtcccacgctggtgacagtgagggcccagggtctgagagcccagatcgcacatgtgcgggctggtggcaggggagatggcagcaaccagactcagacatttctctgcagttgtgctgtgggctcagggtggctctttacgaaggggccccttcgtggggtcatgcactcctgtgtgctttcccttgcatcatgccttgcctgtcttggcaaatatttctctggagtttacccagccagtccaaggtcacagggaagccctgtctgtgtctcacacagaaggtcaacgtccagcactgtccaaactttactcagcaaacagtcacaaagcagctcctgtgtgggggtcggggtggctcactgtggtctctgctgcatgtcacacattgaagcactgtgctggggtcatcgcaggctgtttaactcaattgtcacatgagcctgggtgcacaaaatggtagagcagctcagagagagatggacagacagcatgaacctctgaggagtcaggttttcttggatgaagggacactaagatggctttggagcgtgagaaggacctcacctagcaaatgtgggaaaggagtgagacctccaggcagagggactggctggagacgagcgtgatgtggtgagccatggagtgtatgggtccccacagaacttcagtctgggcctgcacagggcatgtggaggagacaaggaggagggaggtcggtgccggcggttcagtgacagagatcctaaatgggaggccagtgttttgtctgatctctttcatcccaatttcagggtagtttggtcatccacgccacattccaagtgtcccctgggccctttctctccctcacccccctgtctgcacatgagtagatgcctccacgcagccctcccaggacgctcacctctatccacagatgcttctccaaaacccaccaggccctcccatggaacgagctcacctacagggtaaaatcaggtcacggtcacatataggcctgactactcccctcaggaccctcattcacagccactgtattaatttgctggggctgccaaaacaaagtgtcctcatctgggaggctgcagtagatttgctgaaattgatttgctagcgttgctgaaattgattcaagctt

SEQ ID NO: 124 - DNA, 14770 bp, Homo sapiens
gggacaccatcatttgggtttttaaaagcttcagcttctccagcatctttgcattgtgaatatcttcctgcttctagtcaaagctttctctctagtgattggaatgctgctgtaagcctattagaggtgcctgaggatatcaccttttacaaggaagccgtgtgtgcttgagaggatctttttaaatgcattatggctcatgcagcctcacaattaaagaaaaacagggatttagaaatcaatgctgaagaagagcctgagaaaaaaaggaaacaccgcaaacggtcccgggatcggaagaaaaagtctgatgccaatgcaagttacttaagagcagctcgagctggacaccttgaaaaggccctcgactacataaaaaatggagttgacatcaacatttgcaatcagaatgggttgaacgctctccaccttgcttccaaagaaggccatgtagaggttgtttctgagctgctgcagagagaagccaatgtggatgcagctacaaagaaaggaaacacagcattgcacatcgcatctttggctgggcaagcagaggtggtaaaagtcttggttacaaatggagccaatgtcaatgcacaatctcagaatggtttcacgccattgtatatggcagcccaggaaaatcacctggaagttgtcaagtttcttcttgacaatggtgcaagccagagcctagccacagaggatggcttcacaccattggcagtggctttgcaacaaggtcacgaccaagtcgtttcgctcctgctagagaatgacaccaaaggaaaagtgcgtctcccagctcttcatatcgcggcccgcaaagacgacacaaaagccgccgccctgctgctgcagaatgacaacaatgcagatgtggaatcaaagagtggcttcactccgctccacatagctgctcactatggaaatatcaatgtagccacgttgctgttaaaccgagcggctgctgtggatttcaccgcaaggaatgacatcactcctttacatgttgcatcaaaaagaggaaatgcaaatatggtaaaactattgctcgatcgaggagctaaaatcgatgccaaaaccagggatggtctgacaccactgcactgtggagcaaggagtggccacgagcaggtggtagaaatgttgcttgatcgagctgcccccattctttcaaaaaccaagaatggattatctccattgcacatggccacacaaggggatcatttaaactgcgtccagcttctcctccagcataatgtacccgtggatgatgtcaccaatgactacctgactgccctacacgtggctgcccactgtggccattacaaagttgccaaggttctcttggataagaaagctaaccccaatgccaaagccctgaatggctttacccctcttcatatcgcctgcaagaagaatcgaattaaagtaatggaactccttctgaaacacggtgcatccatccaagctgtaaccgagtcgggccttaccccaatccatgttgctgccttcatggggcatgtaaatattgtatcacaactaatgcatcatggagcctcaccaaacaccaccaatgtgagaggagaaacagcactgcacatggcagctcgctccggccaagctgaagttgtgcggtatctggtacaagacggagctcaggtagaagctaaagctaaggatgaccaaacaccactccacatttcagcccgactggggaaagcagacatagtacaacagctgttgcagcaaggggcatctccaaatgcagccacaacttctgggtacaccccacttcacctttccgcccgagaggggcatgaggatgtggccgcgttccttttggatcatggagcgtctttatctataacaacaaagaaaggatttactcctcttcatgtggcagcaaaatatggaaagcttgaagtcgccaatctcctgctacagaaaagtgcatctccagatgctgctgggaagagcgggctaacaccactgcatgtagctgcacattacgataatcagaaagtggcccttctgcttttggaccaaggagcctcacctcacgcagccgcaaagaatggttatacgccactgcacatcgctgccaaaaagaaccagatggacatagcgacaactctgctggaatatggtgctgatgccaacgcagttacccggcaaggaattgcttccgtccatctcgcagctcaggaagggcacgtggacatggtgtcgctgctcctcggtagaaatgcgaatgtgaacctgagcaataagagcggcctgaccccactccatttggctgctcaagaagatcgagtgaatgtggcagaagtcctcgtaaaccaaggggctcatgtggacgcccagacaaagatgggatacacaccactgcatgtgggctgccactatggaaatatcaagattgttaatttcctgctccagcattctgcaaaagttaatgccaaaacaaagaatgggtatacgccattacatcaagcagcacagcaggggcatacgcatataataaatgtcttacttcagaacaacgcctcccccaatgaactcactgtgaatgggaatactgcccttggcattgcccggcgcctcggctacatctcagtagtggacaccctgaagatagtgaccgaagaaaccatgaccacaactactgtcacagagaagcacaaaatgaatgttccagaaacgatgaatgaagttcttgatatgtctgatgatgaagttcgtaaagccaatgcccctgaaatgctcagtgatggcgaatatatctcagatgttgaagaaggtgaagatgcaatgaccggggacacagacaaatatcttgggccacaggaccttaaggaattgggtgatgattccctgcctgcagagggttacatgggctttagtctcggagcgcgttctgccagcctccgctccttcagttcggataggtcttacaccttgaacagaagctcctatgcacgggacagcatgatgattgaagaactccttgtgccatccaaagagcagcatctaacattcacaagggaatttgattcagattctcttagacattacagctgggctgcagacaccttagacaatgtcaatcttgtttcaagccccattcattctgggtttctggttagctttatggtggacgcgagagggggctccatgagaggaagccgtcatcacgggatgagaatcatcattcctccacgcaagtgtacggcccccactcgaatcacctgccgtttggtaaagagacataaactggccaacccacccccacatggtgaaaggagagggattagcagtaggctggtagaaatgggtcctgcaggggcacaatttttaggccctgtcatagtggaaatccctcactttgggtccatgagaggaaaagagagagaactcattgttcttcgaagtgaaaatggtgaaacttggaaggagcatcagtttgacagcaaaaatgaagatttaaccgagttacttaatggcatggatgaagaacttgatagcccagaagagttagggaaaaagcgtatctgcaggattatcacgaaagatttcccccagtattttgcagtggtttcccggattaagcaggaaagcaaccagattggtcctgaaggtggaattctgagcagcaccacagtgccccttgttcaagcatctttcccagagggtgccctaactaaaagaattcgagtgggcctccaggcccagcctgttccagatgaaattgtgaaaaagatccttggaaacaaagcaacttttagcccaattgtcactgtggaaccaagaagacggaaattccataaaccaatcacaatgaccattccggtgcccccgccctcaggagaaggtgtatccaatggatacaaaggggacactacacccaatctgcgtcttctctgtagcattacagggggcacttcgcctgctcagtgggaagacatcacaggaacaactcctttgacgtttataaaagattgtgtctcctttacaaccaatgtttcagccagattttggcttgcagactgccatcaagttttagaaactgtggggttagccacgcaactgtacagagaattgatatgtgttccatatatggccaagtttgttgtttttgccaaaatgaatgatcccgtagaatcttccttgcgatgtttctgcatgacagatgacaaagtggacaaaactttagagcaacaagagaattttgaggaagtcgcaagaagcaaagatattgaggttctggaaggaaaacctatttatgttgattgttatggaaatttggccccacttaccaaaggaggacagcaacttgtttttaacttttattctttcaaagaaaatagactgccattttccatcaagattagagacaccagccaagagccctgtggtcgtctgtcttttctgaaagaacgaaagacaacaaaaggactgcctcaaacagcggtttgcaacttaaatatcactctgccagcacataaaaaggagacagagtcagatcaagatgatgagattgagaaaacagatagacgacagagcttcgcatccttagctttacgtaagcgctacagctacttgactgagcctggaatgattgaacggagtacaggagcaacaagatccctccccaccacttactcatacaagccattcttttctacaagaccataccagtcctggacaacagctccgattacagtgcctgggccagccaagtcaggcttcacttccttatcaagttcttcctctaatacgccatcagcttctccgttaaaatcaatatggtctgtttcgacaccttctccaatcaaatccacattaggcgcgtcaactacatcttcagttaaatccattagtgacgtggcatctccaattagatccttacggacaatgtcttcgccgataaaaactgtggtgtcacaatctccatacaatatccaggtttcctctggtaccctggctagagctccagcagtcacggaagctacgcccttaaaagggctggcatccaattctacgttttcctctcgaacctctccagtgactacagcagggtctcttttggagaggtcatcaattactatgacaccccctgcctcccccaaatcaaacattaatatgtattcctcaagtttgccatttaagtcaattattacatcagcagcaccgctaatatcttcacctttaaagtcagtggtgtctccagttaaatcacgagttgatgtcatttcatcagccaaaattacaatggcatcttctctctcatcacctgtgaagcagatgcctggacatgcagaggtagcattagtcaatggatctatttcccctctaaaatatgcatcatcctcaactttaattaatggatgcaaagccactgccacgttacaggaaaaaatttcttctgctacaaactctgtgagctctgtggtcagtgcagccactgacacagttgagaaagtgttttctaccacgactgcaatgccattttccccactcaggtcatatgtttctgcagcaccatcagcttttcagtctctaagaactccttccgcaagtgcactctatacatcccttgggtcgtcaatatctgcaactacctcatctgtaacttcatcaattataacagtgccagtatactctgtagtcaatgttttgccagaaccagcattaaagaaacttccagactctaattcatttacaaaatcagcagcagccttgctgtcacccattaaaacattgactacggagacacatcctcagcctcacttcagtcgaacttcatctccagttaagtcatctttgttccttgcaccctctgcccttaagttgtctacaccatcttctttatcttccagtcaggagatactaaaagatgtagctgaaatgaaagaggacctaatgcggatgaccgcaatactacagacagatgtgcctgaggagaagccattccaacctgaactcccaaaggaagggagaatagatgatgaagaacctttcaaaattgtagagaaagtaaaggaagacttagtgaaagttagtgaaatccttaaaaaggatgtatgtgtagataataaaggatcacccaaatcaccaaagagtgacaaaggacactctcctgaagatgactggatagaatttagttcggaagaaatccgggaagccagacaacaagctgctgcgagccagtctccatctctgccagagagagtgcaagtaaaagcaaaagccgcctccgaaaaggattataacttgaccaaagttattgattacctaacaaatgatattgggagtagttcactgacaaacttaaaatacaagtttgaggatgcaaagaaggatggtgagggaggacagaaaagagttttaaaaccagcaattgctttgcaggaacacaaactcaaaatgcctccagcctccatgaggacttccacctctgagaaagaattgtgtaaaatggctgattccttttttggaacagatactattttagagtctcctgatgacttttctcaacacgaccaagataaaagtcccttgtctgacagtggctttgaaacaagaagtgaaaagacaccttcagccccacaaagcgctgaaacgactggtcctaaaccactttttcatgaagttcccatccctcctgttattacagaaacaagaactgaagtggttcatgttatcaggagctatgatccctcagctggggatgttccccagacccaaccagaggagcctgtgtcacctaaaccttcacctacttttatggaattggaaccaaagcccaccacctctagtattaaagaaaaggttaaagcatttcaaatgaaagccagtagtgaagaagatgaccacaatcgggttttaagcaaaggcatgcgtgttaaagaagagactcacataaccacaaccaccagaatggtttatcattctccaccaggcggtgaaggtgcatctgaaagaattgaagaaaccatgtcagtccatgacatcatgaaggcctttcagtccgggcgggatccttccaaagaactggcaggtctgtttgaacataagtcggcagtgtctccagatgttcacaagtctgctgctgaaacctcagcccagcatgcagagaaggacaaccaaatgaaacccaaactggagcgtataatagaagtccacatcgaaaaaggtaaccaagctgagcccactgaagtcattattagagaaaccaaaaagcatccagaaaaagaaatgtatgtatatcagaaagacttatcccggggagatattaacctaaaagattttctgccagaaaaacacgatgcttttccttgttcagaggaacagggtcagcaagaagaagaagaacttactgctgaagagtcattgccttcttatctggagtcttccagagtaaacactcctgtgtcccaagaagaagatagccgccctagttctgctcaactcatatctgatgactcttataaaacattgaagcttttgagtcaacactcaatagaataccatgacgatgagttgtcagaactaagaggggagtcttacaggtttgctgagaaaatgcttctgtcagaaaagctagatgtgtctcattctgatactgaggaatcggttacagaccatgcaggaccccctagctcagagttacaggggtctgataagcggtccagagaaaaaatagccactgcccccaaaaaagaaattctctccaaaatctataaagatgtttctgaaaatggtgtaggtaaagtgtctaaagatgagcattttgataaagtgacagtgttgcactattctggcaatgttagtagtccaaaacatgccatgtggatgcgctttactgaggacagattagacagaggtagagagaagttgatatatgaagatagggtggacaggactgtgaaggaggctgaagaaaaactgactgaagtgtcacagttttttcgtgacaaaactgaaaagctaaatgatgaactgcagtccccagagaaaaaggcacgccctaaaaatggcaaagaatattcttctcaaagccctaccagtagcagccctgagaaagtgctactgacagaactgctggcatccaatgatgagtgggttaaggcaagacagcatggccctgatggacaaggcttccccaaggccgaggagaaggcacccagtctgcccagcagcccagagaagatggttctctcccaacagactgaggacagcaagtccacagtggaagccaaaggaagtatttcacagagcaaagcaccagatgggccccagtctggattccagctcaaacaatctaaactcagttccattagattaaaatttgaacaaggcacacacgcaaaaagtaaggacatgtctcaagaagacagaaagtcagatggccagtccagaatcccagttaaaaaaatacaggagagcaagctacccgtctaccaagtttttgctagagaaaaacagcagaaggccatagacctcccagatgaaagtgtatctgtgcaaaaagattttatggtattaaaaaccaaagatgagcatgcccaaagcaacgaaattgttgtaaatgattctggctctgataatgtgaaaaaacagagaactgaaatgtcaagtaaagcaatgcctgactctttttctgagcagcaggctaaagacttggcatgtcatataacctcagatttagcaactaggggaccatgggacaaaaaggtctttagaacatgggagagttcgggagccactaacaataagtctcagaaagaaaaactttcgcatgtacttgttcatgatgtaagagagaatcacattggtcaccctgagagtaaaagtgttgatcaaaagaatgaatttatgtctgtgactgagagagaacgcaaattgttaacaaacggctctctctcagaaattaaagaaatgactgtaaaatctccctccaaaaaagtcttatatagggaatatgttgtgaaagaaggggaccatccaggcggattgcttgatcagccttccaggaggagcgagagctcagcagtgtcacacattcccgtcagagttgctgatgagaggagaatgctgtcttctaatattcccgatggtttttgtgaacagtcggcatttccaaaacatgaactatcacaaaaattgtcccagtcaagcatgagtaaagagacagttgagacacagcactttaattctatagaagatgaaaaagttacctattcagaaatcagcaaagtttccaaacaccagagttatgtaggtttatgcccacctctcgaggaaaccgaaacctcccccaccaaatctcctgattctttagagtttagcccaggaaaggaatctccctctagtgatgtattcgaccacagtcccattgatggattggaaaaactcgcaccactagcccagacagagggagggaaagagataaaaactttacccgtttatgtcagttttgtacaagtggggaagcaatatgaaaaggagatacaacaaggaggtgtaaaaaaaatcataagtcaggaatgtaagacagtacaagaaaccagggggaccttttatacaactagacagcaaaagcaacctccttctccccaaggtagtccagaagatgatactctagagcaagtatcctttctagacagctctgggaaaagccctttaaccccagaaacacccagttcagaggaagtgagttatgaatttacatctaagacacctgactcgctcatagcttatataccaggcaaacccagcccaattcccgaggtttctgaggagtcagaggaggaggaacaggccaagtcaacctcccttaagcagactacagtggaggaaacagcagttgagcgtgaaatgcctaatgacgtgagcaaagactctaaccaaagacccaaaaataacagagttgcctatattgaatttccccctcctccaccactggatgcggaccagattgagtcagataagaagcatcattatctcccagaaaaagaggttgacatgattgaagtcaatctgcaagatgagcatgacaagtaccagctggctgaacctgtcattagagtgcagccaccttcaccagttcctcccggggcagacgtcagtgattcaagcgatgacgaatctatttatcagccagtcccagttaaaaaatataccttcaaattaaaggaagtggacgatgaacaaaaagaaaaacccaaagcttctgctgaaaaggcttccaaccagaaagaactggaaagtaatggatctggaaaagataatgaatttggccttggccttgattcacctcagaatgaaattgcccagaatgggaacaacgaccagtccatcacagagtgttccattgccaccacagcagagttttctcatgacacggatgccacagagatcgactctctggatggctatgacctgcaagatgaagatgatggcttgacagagagtgattctaaactcccaattcaagccatggaaattaagaaagatatctggaacacagagggcattctgaagccagctgaccgctcttttagccaaagtaaacttgaagttatcgaggaggagggaaaggtgggaccagatgaggacaagccaccttctaaaagttcttcatctgaaaagactcctgataagactgatcagaagtcaggggcccagttcttcacactggaaggcagacatcctgacagatcagtgtttcctgatacttacttcagttacaaagtagatgaagaatttgccactccttttaaaacagtagctaccaaaggtctagattttgacccttggtctaataaccgaggggatgatgaagtttttgacagtaaatcacgggaagatgaaactaagccatttgggctggcggtagaagaccgctctccagcaacaacccctgatacaacgccagccagaacgccaactgatgaaagtaccccaactagtgagcctaaccccttcccatttcatgaaggaaaaatgtttgagatgactcgcagtggtgcaattgacatgagcaagagggattttgttgaagagaggctccaatttttccagattggtgagcatacttctgaagggaagtcaggggaccagggggaaggggataaaagtatggtcactgccacaccacagccacagtcaggggacaccactgtagaaaccaatctagagagaaatgtagagacacctacagtggaacctaaccccagcatcccgaccagcggagagtgtcaggaaggcacatccagtagtggctccctggagaaatcagcagcagccactaacacctctaaagttgaccccaagttgcgcacgcctataaaaatgggaatttctgcatccaccatgaccatgaagaaagaaggccctggagaaataacagataagatagaagcggtgatgaccagttgtcagggattagaaaatgaaactataacaatgatttcaaatacagccaatagccagatgggcgttaggccccatgaaaaacatgattttcaaaaagataactttaataacaacaacaatttggattcttccactatacagacagataacattatgagtaatatagttctgacagaacattctgcacccacttgtaccacagagaaagataacccagtgaaagtctcatcaggaaaaaagacaggggtactacaaggacactgtgtaagagataagcagaaagttcttggagaacagcaaaaaacaaaggaattgatagggattaggcaaaaatccaaacttcccataaaggccacttcaccaaaagataccttcccaccgaaccatatgtcaaacactaaagcaagtaaaatgaagcaggttagtcaatccgagaaaaccaaagcccttactacttcttcatgtgtagatgtaaagtccagaattccagtgaaaaacacacccagggataacataattgcagttagaaaagcatgtgccacacaaaagcaagggcagccagagaaaggcaaggccaaacagcttccatccaagttgccagtaaaggtaagatccacctgtgtcactaccaccaccaccactgccaccaccaccaccactaccaccactaccaccaccaccagctgcacagttaaagttaggaaaagtcagctcaaggaagtatgtaaacattccattgaatattttaagggaattagtggtgagaccttaaagcttgtggaccgcctctctgaagaagaaaaaaagatgcagtccgagttgtccgatgaggaagaaagtacctcaagaaacacgtcgttgtccgagacttcccggggtggccagccttcggttacaacgaagtctgctagagataagaaaacagaggcagcacctttaaaatcaaagagtgaaaaggccggcagtgagaaaaggagcagtagaaggactggtccacagagtccatgtgaacggacagatatcaggatggcaatagtagccgatcacctgggacttagttggacagaactggcaagggaactgaatttttcagtggatgaaatcaatcaaatacgtgtggaaaatccaaattctttaatttctcagagcttcatgttattaaaaaaatgggttaccagagacggaaaaaatgccacaactgatgccttaacttcggtcttgacaaaaattaatcgaatagatatagtgacactgctagaaggaccaatatttgattatggaaatatttcaggcaccagaagttttgcagatgagaacaatgttttccatgaccctgttgatggttggcagaatgagacatcaagtggaaacctagagtcctgcgctcaagctcgaagagtaactggtgggttactagatcgactggatgacagccctgaccagtgtagagattccattacctcatatctcaaaggagaagctggcaaatttgaagcaaatggaagccatacagaaatcactccagaagcaaagacaaaatcttactttccagaatcccaaaatgatgtaggaaaacagagtaccaaggaaactctgaaaccaaaaatacatggatctggtcatgttgaagaaccagcatcaccactagcagcatatcagaaatctctagaagaaaccagcaagcttataatagaagagactaaaccctgtgtgcctgtcagtatgaaaaagatgagtaggacttctccagcagatggcaagccaaggcttagcctccatgaagaagaggggtccagtgggtctgagcaaaagcagggagaaggttttaaggtgaaaacgaagaaagaaatccggcatgtggaaaagaagagccactcgtaacagcgaacggtcagtcaaggatcataagtttttactgccagtattgagaaattcgtggaagaaatgtcagcaggaagtaaaaattcaccgagaagtgtgtgtgtgttcgctgcttccacacattaatggcatgattttttttatgcaaaaagaaaagaaaagaaaaccacccacattttaatttagcatgagccaatttacagagcatggaaatcactttcatttccggattggcgcgtgtgcaattagcaatgcagtgtatatacaagaagccatgctgttaacagtttatctcaagtaatttggtgtcatttacaaaaggaagaaattcttgccatcagaagggacagaaggagatggaatgatcaaatcacagagaaacactaaaattactaaatctacaacagctcgccttatttttcttggacccaaactgtcagggtataaacactatttgtttcttttttaaaacatcgatagttttgctgtaaataataacactgtataaattctaacagaaaaatagaataaaatgttgataaggcactgcctcttagaacacaaacagaatattgcaaatgcatttaacaaataggggtctcaagtgacttcaccctagaagaggagggagggattctgggtgggggtgactcttcactgattcttgtatattagcaattataatgtttgtatatgcaaaactgctagcttgattttaaaaaaaaacaaatctttaaaatctgctgcaaatttaaataattcccaaaatgaggaattctgtagttctgtgaaaaatttttttcttcagaatactaatattttgatgcatgtgtatcaccttattttgattaaatcttttccaattttgcaaacactacagtatactgcaacacaaaagattttatctgtaaacacaaagcccttcatctaatatttgttgctattgccaatttttcaatgaaatgacctaaaaacaacaaaaaaaaataacctatacggtagttgctttagggggtggggggatgctatctgttagtgcttaaaagggggtaaatgcttgccgctttagaggtggatggtgctcataaaaggccccagtcgggggtatttaaaaaggactgaacagaaatccttagctagtagaatggcagcacgctgtaaaattattactgtattgtgtactggctataagatgtagacacctttcagtaagccaatcatttgtaaccattctagcagtgtcatattaggttaataaggctgctgtgttttaaagggcatttttatttgggttttggtgaaattctttaatttgttgattatattcacataaaatcagcattcattgacacatagctctaatgacatatgtatgaaaaaccatacactggatgacctagtcgattatttaagcataaaataaattgtgttaaactcttcacct

SEQ ID NO: 125 - DNA, 7720 bp, Homo sapiens
taagttgacacttctcaggttgtcacaagattcaggtatggctcactgttgcaggacataagctgggatctcctgggaattggtctgcttgcaggccctagagagccttccttcttggttgattttcctctagagatccaactgtcttctcaggctcccctgcctgcctcctccttgggtcctttcttgtggcattgccagattactgggcccccattttccctacacttactgccactcatagtctgatggttcccacatctgcatccaacctggactcttcccctgagctttcccctctacaaccaccttccccgggccaagggcacacaggcacctcgacaaaacagtgttctatgtttcttcctgcccaaacctgcccctccctctcccttttcccatctgtggtaccaccatgggctcagagaataaaaaaaatgaaggcttctgtcattgactggggtggagatggagggaagagttagcccagaatcacaggtgctgtagaaaggatacctgagttgccgggagagggggtccatgagttggggatggaaggagagcttggcccttcaaacaattgaagatctgatcaaaagattcagaacatctgtgattttgtggctggtgatgggtgacacctgggctaatggggttgggggagttggtggctctacaatttatggccttgggagatccttgctctctatagctgactgggaggttggaagcctgggctctagcccttgccttgatcctccggatctcattttcctcatctgcctaacaggacagaggggttggaaactgatgagattagctcaaaggatcctggcagctcaggctgcaagatttttttcagacctcagtgtttgggaaaaaattgggtaggtggagcttagggactggccttaggcctgcactgttaattcaccccctcccactaccccatggaggcctggctggtgctcacatacaataattaactgctgagtggccttcgcccaatcccaggctccactcctgggctccattcccactccctgcctgtctcctaggccactaaaccacagctgtcccctggaataaggcaagggggagtgtagagcagagcagaagcctgagccagacggagagccacctcctctcccaggtatgtgacactccccatcccccttcagaggccacacaccctatggcattcccaccatgtgttaaggattttctgaactggaagggccctctgtttgcctgaaggccagagaatcttgaagtggagactgaggcccagaccagagtgtggcctgctcaagattaaacgacaagttagtgttcatccccctgaactagtacctgggctctagcccttcagtccagagctgagttctcagctcttctagtctggggccccaaggttgggtgtgggggtcatgattgttggtggggaggggtcacagctggactaagacctgaaggtgagactaggcaggtgggaaaggagcttgcagagtgatgctgctcaaaaggacaggaagagagcctggcttcagaagcagccacagcaagagagactactgactgaacaggtgggctccactgggggctccggaaaggattttctcagcccccatccccagcactgtgtgttggccgcacccatgagagcctcagcactctgaaggtgcagggggcaaaggccaaaagagctctggcctgaacttgggtggtccctactgtgtgacttggggcatggccctcatctgtgctgaaatgattccacaaagattaaactggctatcatttgttgatttcccccttcttacatttaatccttgcaggagaaagctaagcctcaagatagtttgcttctctttcccccaaggccaaggagaaggtggagtgagggctggggtcgggacaggttgaacgggaaccctgtgctctaaacagttagggtttgttcccgcaggaactgaacccaaaggatcacctggtattccctgagagtacagatttctccggcgtggccctcaaggttagtgagtgagcaggtccacaggggcatgattggatcctggaatgaatgaatcaaccatgagagagtgaatgaacactggaatcaatagagtagcagagtaatggattgtggagcaggaaagagagctgctgggtgggaattcaattccaggcttatatgagccctgctgtgcagtcggcctggagacagcccagctcaggccctgcctagacccctgtcaaggaggccctgtcaagaggagaggaggggcagcacgggggcaaggcaagcttgtgagcgggaaaggcatgtccactttagcgactggtatgtggaagatgagttagaggagacagatggagagaagtcataggaaataaattctgagcattttaggagggcccagacacctggtgtccagtggagtgaaggaaacagtcgcctcccaaaattcagtgtctgaggtcaaaggattgaagttctgtgatgaccaaggagaagccagctctgtggtagggggcacaggagctccccaaggccccagggctgtccagctggctgtcccctgccagcacccatgtcctgtgaccccaccccaccaagatcccatggtttccgggaagggcctactaaactagcttgagtgatgaggctagaaaggggctgggaccaaggtttaaaaagcaaaacaaactaacaaaaaccacactgcagcccccccaactaaaacatttttataaactttttttttttttttgagatggagtctcgctctgtcacccaggctagagtgcaatggcacaatcttggctcactgtaacctccacctcctggattcaagtgattctcctgcctcagcctcccacgtagctgggactacaggcacacgacaccgcacccagctcattttgtatttttagtagagacagggtttcactatgttggccaggctggtctcaaacttctgacctcaggtgatccacccacctcagccttccaaagtgctgggattacaggcatgagccaccgcgcccagcccatttttgtaaacttttacaatgaagtaatttggtgtcaaaatctgacctgaaaattaatgtgagtttatgtatagttttaatttatcccactagtgtaactgtttcaccccagaatatacacttgattattgggtatatgaaaaaaatattttctttgaatcacctttgatgaaatcctaaaaaattttaaccctgaaacatttgaataaggcattgtggacctatggcaaactcctggctatttctgcattttgcccaaatccatccttgaattatatcacctgaacctcgtgaccacctggagaaggcaatgaggctcaagccagggaggggtggtgtctaatcctacctttcattggatctgggaaaactgagggagatgggggcagggctctatctgccccaggcttccgtccaggccccaccctcctggagccctgcacacaacttaaggccccacctccgcattccttggtgccactgaccacagctctttcttcagggacagacatggctcagcggatgacaacacagctgctgctccttctagtgtgggtggctgtagtaggggaggctcagacaaggattgcatgggccaggactgagcttctcaatgtctgcatgaacgccaagcaccacaaggaaaagccaggccccgaggacaagttgcatgagcaggtgggccagggggtgatctggggtggtgagggactggctcaggaagaggaaacgaggacatggaaatgccaaaccccattggcactggtgaactgaagtggaggagcccttcagtttgcattaatatgggtgacttatttcagagacactgtgccaaatgtcggtacaatgccaacagttcaccttcttggttgttgagtttccgcattacagaaataaggaagcaggcccaaaggagagcctgggaaatgaagttggagtgacccatcctggggttgcttgatttagggatttagactgggaatgactcctccaaagatctgagggaagaaactgcacactgtgcatagtggcctcttttctgccagccctaaacagctcaagaagggagagtctctcacattatgaggctgtgtgcaaagcattcttttttttttttcctgagacaaagtctccatatgttgcccaggctggtctcaaattcctggactcaagtgatcctcccacctcagccctcccaaagtgtgggattacagaaatgagccgtacgccctcctgaagcatcttggttcatgcatctcgcaaaactttgggctgtgtctctcgaccacattggacctgaggtctccctataacatttattttgctaccacccctttaatatcctgaacatgatgatataactaaagaaaaagcagaggaaaagtaatttgtaggccaggtgttacggctcacgcctgtaatcccaacactgtgggatgtcgagatgggcagatcacttgagctcaggagttcgagaccagcctgggcaagatggcaaaaccccatctctactaaaaaataaaaaaaattagtcaggtgtggtggcacatgcctgcagtcccagctactcaggaggctgaggtgggcaggtcagttgagcccaggaggcagagattgtagatcgtgccactgcactccagcctgggcaacagagtgagaccttgtcaaaagaaagaaagaacgaaaaaaagaaagaaaggaaggaaggaaggggaggaaggaaagggagggaggaaagggagggaggaaagggagggaggcaagggagagaaacttgtaatacgcatttctttttttttttcttgagatagagttttgctcttgttgcccagggtggatggcagtggcacaatctcagctcactgcaacctccacctcccaggttcaagtgattctcctgcctcagcctcctgagtaggcacacgccaccacacccagctaattttttgtttgtttgtttgttttgtttgttggtatttttagtagagatgggggtttcaccatgttggccaggctggtctcgaactcctcacctcataatccgcccctcttggcctcccaaagtgctgagattacaggtgtgagccactgcgcccggccttaagtgcacattttatttatttatttatttatttatttattgagatggagtcttgctctgttgcccaggctggagtgcagtggcacaatctcagctcactgcaacctccacctcccaggttcaagcaattcttctgccttggcctccagagtagctgggactataggcacctgccaccatgcctagctaatttttgtatttttagtagaaatggggttttgccatgttggccaggctggtctccattcttgaccttaagtgatctgtccacctccacctcccaaagtgctgggattacaggcactatgtgagccactgtgccggcccacattttaatatttagcttgtcagccttaagtaatgagattcaggaagcttgaggataggcacacaggagcatagtttcaagttgtcctgaattttgcagccatcacaagttagtttttaaggaaaaagattagttcctaagttgtttctcaataacttataataaaataacatccacaattgattggctatacattgtttttttgtatcacaaattccacaaacagataatgggtgaggcagctagtcagggacaaaacacttcccaagtagctgggattacaggtgtccgccaccacacttggctagttttttgtttgtttattttttgagatggagtcttgctctgtcgcccaggctggagtgcagtggcatgatctcggctcactgcaagctccacctgccgggttcacaccattctcctgcctcagcctcccaagtagctgggactacaggtgccagccaccacgcccggctaattttttgtatttttagtagagacggggtttcaccatgttggccaggatggtcttgatctcttagcctcgtgatccacccgcctcggcctcccaaaatgctgggattacaggcgtgagccaccgcacccggcctaatttttatatttttagtagagacggggtttcaccatgttggccaggctggtctcaaactcttgatctcaggtgatccacctgccttggcctcccaaagtgctgggattacacaagtaagccactgcacccagcctggggttacaatttaaattgcttttttaccttcaaatctttgacacctcagtgaggcttaatctgaccgcactattacactacaagtccccatccgtctctgcttaatttttgtccaaagcaaaaatcaggtgatgtgttcattgttgtaaccccagtttctacaaaagtacctgggtgagagtaagtaggatctcaataaaggttgaattaacaaattttgtaatgactgcaactccagcaggagctcccttttgggctcccactgtctctgacggccctctcccctaaagaggtcccaatagcaagtattttcctgggtgacttccagtgggctggggaatcaaggactaagaggggagacactgcatgtggaatattctggctgtgctggctgtgctggctgtggactgagtcctctgtcttcccccatccagtgtcgaccctggaggaagaatgcctgctgttctaccaacaccagccaggaagcccataaggatgtttcctacctatatagattcaactggaaccactgtggagagatggcacctgcctgcaaacggcatttcatccaggacacctgcctctacgagtgctcccccaacttggggccctggatccagcaggtatgcatggcttcctgcaggtacaagacctagcggagcagctgagctttccaggcatctctgcaggctgcaaccccagctccagttctattcggggctgagttgctgggattcttgaacctgagcccttcttttgtatcaaaatcacccaggtggatcagagctggcgcaaagagcgggtactgaacgtgcccctgtgcaaagaggactgtgagcaatggtgggaagattgtcgcacctcctacacctgcaagagcaactggcacaagggctggaactggacttcaggtgagggctggggtgggcaggaatggagggatttggaagtggaggtgtgtgggtgtggaacaggtatgtgacaatttggagttgtagggctggcagacctcaagatagttccgggcccagtggctaaaggtcttccctcctctctacagggtttaacaagtgcgcagtgggagctgcctgccaacctttccatttctacttccccacacccactgttctgtgcaatgaaatctggactcactcctacaaggtcagcaactacagccgagggagtggccgctgcatccagatgtggttcgacccagcccagggcaaccccaatgaggaggtggcgaggttctatgctgcagccatgagtggggctgggccctgggcagcctggcctttcctgcttagcctggccctaatgctgctgtggctgctcagctgacctccttttaccttctgatacctggaaatccctgccctgttcagccccacagctcccaactatttggttcctgctccatggtcgggcctctgacagccactttgaataaaccagacaccgcacatgtgtcttgagaattatttgg

SEQ ID NO: 126 - DNA, 662 bp, Homo sapiens
ccccagccatggagcaagacaacagcccccgaaagatccagttcacggtcccgctgctggagccgcaccttgaccccgaggcggcggagcagattcggaggcgccgccccacccctgccaccctcgtgctgaccagtgaccagtcatccccagagatagatgaagaccggatccccaacccacatctcaagtccactttggcaatgtcgccacggcaacggaagaagatgacaaggatcacacccacaatgaaagagctccagatgatggttgaacatcacctggggcaacagcagcaaggagaggaacctgagggggccgctgagagcacaggaacccaggagtcccgcccacctgggatcccagacacagaagtggagtcaaggctgggcacctctgggacagcaaaaaaaactgcagaatgcatccctaaaactcacgagagaggcagtaaggaacccagcacaaaagaaccctcaacccatataccaccactggattccaagggagccaactcggtctgagagaggaggaggtatcttgggatcaagactgcagtttgggaatgcatggacaccggatttgtttcttattccttcacttttggggaaaatctcttgtttttaaaaagtgataaatttggtgttaggtcaaaaaaaaaa

SEQ ID NO: 127 - DNA, 1280 bp, Homo sapiens
tgccgcagcccccgcccgcccgcagagcttttgaaaggcggcgggaggcggcgagcgccatggccagtccgggctgcctgctgtgcgtgctgggcctgctactctgcggggcggcgagcctcgagctgtctagaccccacggcgacaccgccaagaagcccatcatcggaatattaatgcaaaaatgccgtaataaagtcatgaaaaactatggaagatactatattgctgcgtcctatgtaaagtacttggagtctgcaggtgcgagagttgtaccagtaaggctggatcttacagagaaagactatgaaatacttttcaaatctattaatggaatccttttccctggaggaagtgttgacctcagacgctcagattatgctaaagtggccaaaatattttataacttgtccatacagagttttgatgatggagactattttcctgtgtggggcacatgccttggatttgaagagctttcactgctgattagtggagagtgcttattaactgccacagatactgttgacgtggcaatgccgctgaacttcactggaggtcaattgcacagcagaatgttccagaattttcctactgagttgttgctgtcattagcagtagaacctctgactgccaatttccataagtggagcctctccgtgaagaattttacaatgaatgaaaagttaaagaagtttttcaatgtcttaactacaaatacagatggcaagattgagtttatttcaacaatggaaggatataagtatccagtatatggtgtccagtggcatccagagaaagcaccttatgagtggaagaatttggatggcatttcccatgcacctaatgctgtgaaaaccgcattttatttagcagagttttttgttaatgaagctcggaaaaacaaccatcattttaaatctgaatctgaagaggagaaagcattgatttatcagttcagtccaatttatactggaaatatttcttcatttcagcaatgttacatatttgattgaaagtcttcaatttgttaacagagcaaatttgaataattccatgattaaactgttagaataacttgctactcatggcaagattaggaagtcacagattcttttctataatgtgcctggctctgattcttcattatgtatgtgactatttatataacattagataattaaatagtgagacataaatagagtgctttttcatggaaaagccttcttatatctgaagattgaaaaataaatttactgaaatacaaaaaaaaaaaaaaa

SEQ ID NO: 128 - DNA, 3362 bp, Homo sapiens
aaaaaatcaattttggaagatgtcactgaacaactcttccaatgtatttctggattcagtgcccagtaataccaatcgctttcaagttagtgtcataaatgagaaccatgagagcagtgcagctgcagatgacaatactgacccaccacattatgaagaaacctcttttggggatgaagctcagaaaagactcagaatcagctttaggcctgggaatcaggagtgctatgacaatttcctccacagtggagaaactgctaaaacagatgccagttttcacgcttatgattctcacacaaacacatactatctacaaacttttggccacaacaccatggatgccgttcccaagatagagtactatcgtaacaccggcagcatcagtgggcccaaggtcaaccgacccagcctgcttgagattcacgagcaactcgcaaagaatgtggcagtcaccccaagttcagctgacagagttgctaacggtgatgggatacctggagatgaacaagctgaaaataaggaagatgatcaagctggtgttgtgaagtttggatgggtgaaaggtgtgctggtaagatgcatgctgaacatctggggagtcatgctcttcattcgcctctcctggattgttggagaagctggaattggtcttggagttatcatcattggcctatccaccatagtaacgacaatcacaggtatgtccacgtctgctattgccacgaacggagttgttagaggaggtggggcctactatcttatttccagaagtttagggcccgagttcggtgggtcaataggcctgatctttgcttttgctaatgcagtggctgttgctatgtatgtggtgggattcgctgaaactgtagtagatctacttaaggagagtgattcgatgatggtggatccaaccaatgacatccggattataggctccatcacagtggtgattcttctaggaatttcagtagctggaatggaatgggaggcaaaggcccaagtcattcttctggtcattcttctaattgctattgcaaacttcttcattggaactgtcattccatccaacaatgagaaaaagtccagaggtttctttaattaccaagcatcaatatttgcagaaaactttgggccacgcttcacaaagggtgaaggcttcttctctgtctttgccatttttttcccagcagctactgggattcttgctggtgccaatatctcaggagatttggaggatccccaagatgccatccccagaggaaccatgctggccattttcatcaccactgttgcctacttaggggttgcaatttgtgtaggggcctgtgtggtccgagatgccaccgggaacatgaatgacaccatcatttctgggatgaactgcaatggttcagcagcatgtgggttgggctatgacttctcaagatgtcgacatgaaccatgtcagtacgggctgatgaacaatttccaggtcatgagcatggtatcagggttcggccccctcatcactgcgggaatcttttctgcaacactctcctccgccctggcctcccttgtcagcgcacccaaagtgttccaggctctgtgcaaggacaacatctacaaagccctgcagttttttgcaaagggatatgggaaaaacaatgaacccctgagaggatatattctcacttttcttatagccatggcatttattcttattgcggaactgaacaccattgctcccatcatctccaactttttcctggcctcatatgcacttattaatttctcctgcttccatgcctcttatgccaaatctccaggatggagacctgcgtatggaatttacaacatgtgggtatctctttttggagctgttttgtgctgtgcagtcatgtttgtcatcaactggtgggcagctgtcatcacctatgtcattgaattcttcctttacgtctatgtgacttgtaagaagccagatgtgaactggggctcctccacacaggctctttcctacgtgagtgctttagacaatgctctggaattaaccacagtggaagaccacgtaaaaaacttcaggccccagtgcattgtcttaacagggggacccatgacaagacctgctctcctggacataactcacgcctttaccaagaacagtggcctttgcatctgctgtgaagtctttgtgggaccgcgcaaactgtgtgttaaggagatgaacagtggcatggcgaaaaaacaggcctggcttataaagaacaaaatcaaggctttttatgctgcagtggcggcagactgtttcagggatggtgtccgaagtcttcttcaggcctcaggcttaggaagaatgaaaccaaacactctggtgattggatataagaaaaactggaggaaagctcccttgacagagattgagaactacgtgggaatcatacatgatgcatttgattttgagattggcgtggttatagtcagaatcagccaaggatttgacatctctcaggttcttcaggtgcaagaggaattagagagattagaacaggagagactagcattggaagcgactatcaaagataatgagtgtgaagaggaaagtggaggcatccgaggcttgtttaaaaaagctggcaagttgaacattactaagacaacgcctaaaaaagatggcagcattaacacaagccagtcgatgcatgtgggagagttcaaccagaaactggtggaagccagcactcaatttaaaaagaaacaagaaaaaggcacaattgatgtttggtggttgtttgatgatggagggttaacacttcttatcccctatatcttaactctcagaaaaaaatggaaagactgtaaattaagaatctatgtgggagggaagatcaaccgcattgaagaagaaaaaattgcaatggcttcccttctgagcaaatttaggataaaatttgcagacatccatatcatcggtgacatcaacattaggccaaacaaagagagctggaaagtctttgaagagatgattgaaccatatcgtctccatgaaagctgcaaagatttaacaactgctgagaaattaaaaagagaaactccgtggaaaattacagatgcagaactggaagcagtcaaggaaaagagttaccgccaagttcgactgaatgaactcttacaggagcactccagagctgctaatctcattgtcctgagccttcccgtggcaagaaagggatccatatcggatttgttgtatatggcttggttggaaatcctcacaaagaacctcccacctgtcttactagttagaggaaatcacaaaaatgtcttgacattttactcttaaaacatgaaagattggaatacattttaacttaatgtaatgcata

SEQ ID NO: 129 - DNA, 62944 bp, Homo sapiens
gatcctatttctaaggagtaagataataatataacagccggccgggcacagtggctcacgcctgtaatcccagcactttgggaggccgaggcaggcggatcacctgaggtcgggcattcgagaccagcctgacaaacatggagaaaccctgtctctactaaaaatacaaattagctgggcgtggtggtgcatggctgtaatcccagctattgggaaggctgaggcaggagaattgcttgaacccgggaggcagaggttgcaatgagctgagattgcaccattgcactccagcctggacaacaagagcgaaactctgtctcaaaaataataataataataatataatagcattctattaactgtttagtcttctaggacttgcactgtaatgccacagtccatcaggttgttgcacacagctgtgcttcatccattttcaacagaatgtaatatgtcattgtgtgaaattaccacaggacatggtttcaacatccacaaaatgattaacttgatgctctctgaggcgccttttagatatgagaatctaggaccctctgcaccgtcttaacccaagagtttgcttgatggagagcgggaagaataatgcaagttgcatctccaatatctcccctcccctccacagggttttgaaggccccacctgcagccacagggccccttcctgcggcttccatcactgccaccacggaggcctgtgtctgccctcccctaagccaggcttcccaccacgctgtgcctgcctcagtggctatgggggtcctgactgcctgaccccaccagctcctaaaggctgtggccctccctccccatgcctatacaatggcagctgctcagagaccacgggcttggggggcccaggctttcgatgctcctgccctcacagctctccagggccccggtgtcagaaacccggagccaaggggtgtgagggcagaagtggagatggggcctgcgatgctggctgcagtggcccgggaggaaactgggatggaggggactgctctctgggagtcccagacccctggaagggctgcccctcccactctcggtgctggcttctcttccgggacgggcagtgccacccacagtgtgactctgaagagtgtctgtttgatggctacgactgtgagacccctccagcctgcacgtgagcctgaaatccactggagccagggaaggagaggggtgggtgagaggaggaggaaggacgtagatggctctgagttacagtgtggccacagccttgggctccagggagtttccaccctaataaccatcactaaacaggggtcgaagactctggactccaacctagggtaatggggtggcatcagtatttaatgtggggcgtggcctttgggctcctctctaagagttgaaggaactcaggtctcaagcctccttccctaagccttgctgccatggagtatttcccctagcagtcagcacctcacagagggaaaagggcctgggactctcctttagaaacagaggagagcttgggagggtacagagaggggacagtctagggagacaggggtgttagcagacattggggtgtctggactaccatccaggacttgactaagctcattgctccacagctgcccccacttagcaaccaaagccctagagggcacaaaatatggggaattctttctagggtgaagaaaagagtcaggttttagggaggtcctgagtccccctctccttaccccacagtccagcctatgaccagtactgccatgatcacttccacaacgggcactgtgagaaaggctgcaacactgcagagtgtggctgggatggaggtgactgcaggcctgaagatggggacccagagtgggggccctccctggccctgctggtggtactgagccccccagccctagaccagcagctgtttgccctggcccgggtgctgtccctgactctgagggtaggactctgggtaaggaaggatcgtgatggcagggacatggtgtacccctatcctggggcccgggctgaagaaaagctaggaggaactcgggaccccacctatcaggagagagcagcccctcaaacacagcccctgggcaaggagaccgactccctcagtgctgggtaagaagctaggtggagggaagggccagacaccagtttttttaagagggcagagggaggaaagggagccagggaccaatacagaggtctctgaggtgcctcctctacaggtttgtggtggtcatgggtgtggatttgtcccgctgtggccctgaccacccggcatcccgctgtccctgggaccctgggcttctactccgcttccttgctgcgatggctgcagtgggagccctggagcccctgctgcctggaccactgctggctgtccaccctcatgcagggaccggtaggtgaccccttgccactttctctgacctctgttcccaggccagctctcatgctagcaacaggcaatggaggctgaatcaaacaggacagctgagactgaaaatgttctttgtggggacttactttccctaaccccgctttctctaactgaatctcccactggcccatttgttctacagtctccttccttatttccctaagcacattatcctaacctctgtcatagccctccaacaaagggatggtttatcttctctaccagactgagaatacctaatagtctttgtatcagacaattcatagtacatgaaagaataataggctgggcgcagtggctcatgcctataatcccagcacgttgggagaccaaggcaggtggatcacgaggtcaggagattgagaccatcctggctaatgcggtgaaaccctgtctctactaaaaataaaaaaattagccggctgtggtggcgggtgcttgtagtctcagctactcaggaggctgaggcaggagaatggcgtgaacctgggaggtggagcttgcagtgagccgagatcgcgccactgcactccagcctgggcgacagagggagactccatctcaaaaaaaaaaaaagaaaaataactgctatatcgtactttgtgccttactctaagcattttacattgttacctcatttaatcctcccccacaaccccatgaggcacgtactgctggttgagtatcccttatctgaaatgcttgggaacaaaagtgtttcagatttcggatttattttggaatatttgcattatacttactggttcagcatccctaatacaacatccaaatgctacaatgagcatttcctttgagcgttatgttggtactctaaaagtttcagactttggaacatttcagatttgggattggggttatggatactcagcctttttttgtgtgtttgttttctgagacagtcttactctgtcagccacactggagtacagtgacgccatctcagctcactgcaacctctgcctcctgggtttaagcaattctcttgcttcagactactgagtagctggaattacaatggcatgccaccatgccctgataattttttttgtttttgttttgttttgttttgtttgagacagagtcttgccttgtcgcccaggccggagtgcagtggcgcgatctcggctcactgcaagctccacctcccaagttcacgccattctcctgcctcagcctcccaagtagctgggactacaggtgcccgccaccacacctggctaattttttgtatttttagtagagacagggtttcaccatgttagccaggatggtctcgatctcctgacctcatgatccacctgcctcagcctcccaaagtgctgagattataggagtaagccactacacccagccactaatttttatatttttagtagagagggggttttgccatgttggccaggctggtctcgaactcctggcctcatatgatccacctgcctcagcttcccaaagtgctgggattacaggcatgagccactgtgcccaacctcaatctatattatcatccccattttgcagataaggaaaccgaggcaaagacaggctactaaacttgtccaaaggtctcccaatagtaatcagtctcaccaggagtggcctctctttgtgactctgtctctcccaccagcaccccctgccaaccagcttccctggcctgtgctgtgctccccagtggccggggtgattctcctggccctaggggctcttctcgtcctccagctcatccggcgtcgacgccgagagcatggagctctctggctgccccctggtttcactcgacggcctcggactcagtcagctccccaccgacgccggcccccactaggcgaggacagcattggtctcaagtgagaatgaggagaaacccaggctcaggaaggggagtctctcctatggcgatatttacaatcagaaaagataagaaatactattgcagaagtcaaagataggggaaggagagaggggtgggaagcctgctggaaattttggagaccctgatggtcataattccgtgtaacctctacccacccattcctttccagggcactgaagccaaaggcagaagttgatgaggatggagttgtgatgtgctcaggccctgaggagggagaggaggtgggccaggtgaaagggctggggcaagaatggtctggaggtgatggaagggatgaaagggcaaatcaaccttcactgatccttgctgttacccaaaggctgaagaaacaggcccaccctccacgtgccagctctggtctctgagtggtggctgtggggcgctccctcaggcagccatgctaactcctccccaggaatctgagatggaagcccctgacctggacacccgtggacctggtatgtgagtcaacccagaccaagaaaaaaaaaaaaagtcctttgaccctattagaatcagagagtcctttaatatcagaactagaggaaataattttagactgagtgccttagaacaatgattctcaaagtgtggtcctcagacagcaaaatcagcatcacctgggaatttgtcagaaatgcaaattattgggctccactacagagctactgactcaggaatttaaaatgttaggcaatctgttttaacaagcccttcaggtgaatctgatccagactcgtttgagaaaaccactgctaggccgggcgtggtggctcacgcctgtaatcccagcactttgggaggccaaggcgggtggatcacaaggtcaggagatcgagaccatcctggctaacacagtgaaaccccgtctctactaaaaatacaaaaaattagccgggcgtggtggcgggagcctgtagtcccagctgctctggaggctaaggcaggagaatggcgtgaacctgggaggaggagcttgcagtgagccgagatcgcgccactgcactccagcctgggtgacagggcgagactccgtctcagaaaaaaaaaaaaaaaaaagagaaaaccactgccctggaatgtcagagaattaagctgcaggttccttttacagaggaagaaactgaagtcagagaaaagcagaaaagtcacttggctaaagccacacagagccagaacttagcttcccaacacctcaggttttgattctctctgagcttacatgttgtcccttcccccttgttgtgtcctttagattgacccattactctgtcttaccaacagatggggtgacacccctgatgtcagcagtttgctgtggggaagtacagtccgggaccttccaaggggcatggttgggatgtcctgagccctgggaacctctgctggatggaggggcctgtccccaggctcacaccgtgggcactggggagacccccctgcacctggctgcccgattctcccggccaaccgctgcccgccgcctccttgaggctggagccaaccccaaccagccagaccgggcagggcgcacaccccttcatgctgctgtggctgctgatgctcgggaggtctgccaggttagcacacactgaggtccctacagggaatggggcgagcttacaagtaaagctggacagaagcatcccctagagtttgacaaggaggaaattggtgtgattgggaacctgacagggaaactgcggaggatggctgaatatggattgcgagtggggttaatagtgtaaggaactcgagttggcagtccaaggtaccccaggggtcactggccctctgtctccccagcttctgctccgtagcagacaaactgcagtggacgctcgcacagaggacgggaccacacccttgatgctggctgccaggctggcggtggaagacctggttgaagaactgattgcagcccaagcagacgtgggggccagagataaatggggtatgtagaggaaggggtgatgtatgctatagagaagttgagcagatggggtgggagatagcgtgcaaaatataggtgcagcagaggggcattccctctcatcctgctgttacggcggtcaatctgagatgcggtggaagtacgggccgcgtgagtttccccccccaactcccaccctcaacaccacactggccctccgctccagcttactggggaactggcatggaacacagtgtctgtggaaaggggggggaatctcgtggggggagactgtctcccggtctcaccgaccccagaacaatgccccattgtccctcccgcgcactggtgacgtcaccagggcaacacttcctgcaggccggtggtctcctgggcaacgcttcccgcctttgagggaccagccggcccgaatagcccttcccccaaggccagaacccgtgggaaaccggaacccaggcgtctggcccccaactggggtaacaacctcccacgtcgtcccctagggaaaactgcgctgcactgggctgctgccgtgaacaacgcccgagccgcccgctcgcttctccaggccggagccgataaagatgcccaggacaacagggttagatgggacagagggcttcccacaaaacagtcaggcgcacgagagatggaaagtgcggtaacccgcaaagcctgaagggataggggccagtggtcgcgcaagtgaaggcagaaaggcccagtcctgtgggcgtggccttccctgatatcggccctggctcttctgtacaggagcagacgccgctattcctggcggcgcgggaaggagcggtggaagtagcccagctactgctggggctgggggcagcccgagagctgcgggaccaggctgggctagcgccggcggacgtcgctcaccaacgtaaccactgggatctgctgacgctgctggaaggggctgggccaccagaggcccgtcacaaagccacgccgggccgcgaggctgggcccttcccgcgcgcacggacggtgtcagtaagcgtgcccccgcatgggggcggggctctgccgcgctgccggacgctgtcagccggagcaggccctcgtgggggcggagcttgtctgcaggctcggacttggtccgtagacttggctgcgcgggggggcggggcctattctcattgccggagcctctcgggagtaggagcaggaggaggcccgacccctcgcggccgtaggttttctgcaggcatgcgcgggcctcggcccaaccctgcgataatgcgaggaagatacggagtggctgccgggcgcggaggcagggtctcaacggatgactggccctgtgattgggtggccctgggagcttgcggttctgcctccaacattccgatcccgcctccttgccttactccgtccccggagcggggatcacctcaacttgactgtggtcccccagccctccaagaaatgcccataaaccaaggaggagagggtaaaaaatagaagaatacatggtagggaggaattccaaaaatgattacccattaaaaggcaggctggaaggccttcctggttttaagatggatcccccaaaatgaagggttgtgagtttagtttctctcctaaaatgaatgtatgcccaccagagcagacatcttccacgtggagaagctgcagctctggaaagagggtttaagatgctaggatgaggcaggcccagtcctcctccagaaaataagacaggccacaggagggcagagtggagtggaaatacccctaagttggaaccaagaattgcaggcatatgggatgtaagatgttctttcctatatatggtttccaaagggtgcccctatgatccattgtccccactgcccacaaatggctgacaaatatttattgggcacctactatgtgccaggcactgtgtaggtgctgaaaagtggccaagggccacccccgctgatgactccttgcattccctcccctcacaacaaagaactccactgtggggatgaagcgcttcttctagccactgctatcgctatttaagaaccctaaatctgtcacccataataaagctgatttgaagtgttacctttttttggaggaattggggagaagaatgggaaaaaagatgggagtgactgcataatgtcagcattttgtgcttttggctcagcatttggattggatggaggatgtaagtatagtttaaaagcaagaataagtatatttaggggccctatgataatttagggtattatctgaaagcaagaatctagtagccaagggagaaaccgcacacactaggtcaggggtccccaacccttgggccacagactggtactggtccatggcctcttaggaactgggccacacagcaggaggtgagcaagcattactgcccaagctccacctcctgtcagatcagcataagcattaaattctcataggaactcgaaccctattgtgaactgtgcatgcaagggatctaagtttctcgcttcttacgggaatctaatgcctaatgatctggggtggaacagtttcatcctgaaaccagccctccgtcgccaccgaccatggaataattgtcttccacgaaactcttccctggtgccaaaaaggtaggagaccactgcactagatgatgcacacactttgtccctcatcctagggcttttacttatggccacttaggagattcctaaggccacaagtcaagtagatggagagagtatcttgaaactttgtccaccttgcagcaatatgttgctaggtttgaaacatggagtcatgaggcattttgaaagccaataatatctacagtttattaagtattcactatgcatcaagtgctttattacattattaatacatcaaccctatgaagtaggtgctattaaaaccctatttcactcagaaattgaggcacagagatctgcccaagattgcaaggaataagcggcaggaccagatctcttcatcacatttcacattccaaatcactcagctataaactccctaacatgacaggttgccatttagaggtaccaaatggttgtctgccctgctccttccttgatgccaaccagcctgattagcattgatcaaagaccaagccagagaggtagtcctctcccttttcaatttcatttcatttctttctttttctgaaacagggtattgctctgttgcccagcctggagtgcagtggcacaaatggctcactgcagccacaacctcctgggctcaagcaatcttcctacctcagcctctcatttttccatatctatatctcttatgcccaaaataaactttcccctgccccttgtctgcactaaactgtaagtttccaaaatgaacccttcccgtactctatttggtacacatcttgtctcctgaatagagtgtattttttattttattttattttggagacggagtctcgctctgtcacctaggctggagcgcagtggcacaatctcagttcaccgcaacctccgcctcccgggttcaagcaattctcctgcctcaacctcctgagtagctgggattacaggcgcatgtggccacgcccagctaattttttgtattttagtaaagatggggtttcaccatgttccccaggctggtctccaactcctgagctcaggcaatccacccgcctcagcctcccaaagtgctaggattacaggtgtgagccaccgcagccggccatctcctgaatagattttaaatacctagaggtcagggatgattattcaatacatatatattgaatacttactatgtgttggacccggtgctagggttttatgtatatatttgagagctccacatccctggatctgaatcctccacttcccactggaaccatgcccctcccagtcccggtaagtaagagggaagatcgggagggccaaatcctacaccagggtctatcttagggagggaagggacctggctggggggagggggattctgaggagtgaaaccacttcctgtgtagctagttcctgtgttgacagaaagagcagaagaggaggtggggtggagggagcagagccagggattaggggactactgaggctctggagatgagaccgccaggagtccttccccaccatgagccccctccactcctgcagctggaggagtttttcccagtctcagtgctgccctggggcgagagagactgaacaagctgtttgggtgggaagagaatggaggaagttgacagggatgggcggggcccgtgggggggctgaccaggaacccagcttcctgctcagtacccaggcatccagcccccagctcacccccaccccttccagcccccactcccctcaggaacccaaggttccagccctcctcccaaatcccagccacccctcccccaccagtttctcccctctaggggatggaggctgagagaccccaggaagaagaggatggtgagcaggtgagctgggcacggggttggggaggctgacactgggaaagaagggaggtgagaggacctggggcagaaatgtagggacacaggggccttgaaaggcttgggcaaactgaggcaggaacagagacacacagagaggaaacgggccactggcctagccccctgtccactcctcccgcttcaaccaccactgcttgactagaatggacatattttggcatcagggcccccctcaggatgaggaaggctggccccctccaaactccaccactcggccttggcgatctgctcctccatcccctcctcctccagggacccgccacacaggtacccctacccacccagggagagccccgaccctagtgcccacatcctgaccccattaccaaggcccactccattgtgggccctctccccacctcctccagactccccttgggattccccattgcaccccctctcctctgatccaaagtccctaatcacgtcaccctgtccacactcccccacggctcctgtctgccaacctctctgggtctctgagccctccacacccctctccccagccctgggaccccgctcggcctccctgctctccctgcagactgaactccttctggacctggtggctgaagcccagtcccgccgcctggaggagcagagggccaccttctacaccccccaaaacccctcaagcctagcccctgccccactccgtcctctcgaggacagagaacagctttacagcactatcctcagtcaccaggtaagacatccccccaggaggcaaacccaggcctcctggtctcttggcccctgttctctttggggctctactcctgtttctccctaggcaccccatcgccttcacaggtttcctatatgcctccccataccaacccttgatcctctcaagaacctcctcctctcagaccctcaccaaagctctccctctccctccactcctccagtgccagcggatggaagcccagcggtcagagcctcccctccctccaggggggcaagagctcctggagttgctgctgagagttcagggtgggggtcgaatggaggagcaaaggtcccggccccccacacacacctgctgagacttgagccccaaccagcccttccttgccactggtctcaaagctgggcagcccattgcatgccctcaactcttgcttggcaggggtaccagagactgaaagacacggcacaaatctcaatattcatctcccacatcaccttccctgggaactggacagggtgaaagtcctcaaactctgggaacaggcgagatggaacagggatttaactccccgcccacaggtccatgggagcttgaggcagtaagggggatcccaggcacccatctcaaggagtggctgggagtcttttccctaacttgtggggacaccaccagttgtcaagctactaggcagtagggtctgagggctcaggcctccacctgagaggttataacctgagagacagctctacccttcctcccagtaagaagggaaggtgggtgggcacctgagagattaagactattctcccagtcccactaccagcacccccgatccctgagactgaggggtttacgggctgtgaatggaccttcagccctgcccaccctccctccccactgctgctgagtctgtctgatgttttggttgtgtgaataaatataattcccctctggactgcagactggtatctggggggcccaggcggggtgaaaggtaggaaggtgaggccagaggccttttctctccccagtctggccagaggccagctcccctccccggctggttaattactggctcattaagcagcggctggagacctccctaattatctcccccagcccccctcttcggttttaattaagtagaacagggaggggagtcattagaacaagaaatacgaactgagctgccggtgaacccaggcattccagcggcctgagtccacatcgcttagatccctgattcaggacccaggtgacagacgcccccagccgccaacacagccccactcctaggccgcggaagtccagccagggggctttcccatatctttcagatggcccgtctcctcccctcatcccctcttccctctcccctcctccactaggtctcagttcctctgtttctgtgtctctctctccgcccccagctcctccctgttcctcctctcttctcccctcctcttcctctccggctcccctcccccagcctccctccctcgctccccccccttctccctcctccctcctccctctctctcacacacacccccgcttgggcctcctctctctctccggctccattttctccgccgccgggggccggggtctcctgtggggggcccagccggtatcccaggtctcccttcagtgccggggtgaacccccgggggagccgggagccgggggcagacgggcgggggttggggcggagggagcagcggccccagcgagtttggggggagaagtaaccaggcggggggaggggcggagcagggagggggcctcagggcccccccccagctatggacgaacggctactggggccgccccctccaggcgggggccgggggggcctgggattggtgagtggggagcctgggggccctggcgagcctcccggtggcggagaccccggtgggggtagcgggggggtcccgggaggccgagggaagcaagacatcggggacattctgcagcagataatgaccatcaccgaccagagcctggacgaggcccaggccaagtgagtgcccccactccgggaccccacacagacccagcaaaccccgttcacatgttctgaatcttctgggagccccccccaactccagggccctctccaggatccaacagctctcttctctccttattcctgggagcccatagaaaagtgatccctctcaaacctcccttcacccccaggccctgaaaccttcacagagggaacccccggtggcccggctccccactcctaaccttttgccgacccctgcagtctcctggaacagccccatccccgggagccccctctggctcccagactaagaaactgttcttgggctacgttatcttctcccctaactctccacccagccccctcattctctccagatgtggagacctccacaccctctccagagcccctaaagctcctctccactgctcagccagacactaggtgcatcaaagcctcccacctgctcagccccaggaccccttcacacaccctacactgatctccccagttagctcggcacccccagccccactctgccacctcaaactctgactcttctcaaccccagcttctgtctctctccctctgaaacctaccaagtcactttcctttctccatccactcccagattcctcctcctacctttctagaccatctcccaaagcccgcagcctttaacctgctgcctgcatcttccctgtgtctccctgaagctgaggagcttccccatgctctgggagctgatcttttcccaagaactcctcattccacccccaactcattccacccccaatccgcttcctccctccgcagactgaccctcctccctccttgttctcaggccccctgctctgtttctctagctcctcaacttttctctttccccactcccactcctcccaaggaaacacgccctaaactgccaccgaatgaagcctgctctctttagcgtcctgtgtgaaatcaaggagaaaactggtatgtgggccccccccggattgctcaactctgggaacagaaccctgttcattatagggctagagtgtgacaacttggggccctgaggaaagtaaggagtcagggggactggggaaggaaccaaagcctgggaacttggctctccaggaagcaccaggaggactgagcactgggtattggggtctctgggtccctaagtccactcgcctgcatgctaggcctcagcattcggagctcccaggaggaggagccggtggacccacagctgatgcgcttggacaacatgcttctggcagagggtgtggctgggcccgagaaagggggcggctcagcagcagcagctgcagccgctgcagcctctggtggtggtgtgtcccctgacaactccatcgaacactcggactatcgcagcaaacttgcccagatccgtcacatataccactcggagctggagaagtatgagcaggtaaggagaggaggcttgggtgggtggagggaagggctcttgcaggggaatcccatggtcaaagggctcctcctcaccagcccactggcccccactacaggcatgtaatgagttcacgacccatgtcatgaacctgctgagggagcagagccgcaccaggcccgtggcccccaaagagatggaacgcatggtgagcatcatccatcgaaagttcagcgccatccagatgcagctgaagcagagcacctgcgaggctgtgatgatcctgcgctcccgtttcctggatgccaggtgggcccagggaccccaggctggcccccagcactgggctccttcccattcctctccaagaccctgagctgccatgctgcacaacatggtactccatgacaatggtgactctggggtcatgccatgtgacagccctgccaggacatcaacatcctcctcaccgctcttctccctcctctgtagacgaaagcgccgtaacttcagcaaacaggccactgaggtcctaaatgagtatttctactcccacctgagtaacccatatcctagtgaggaggccaaggaggagcttgccaagaagtgtggcatcaccgtgtctcaggtattatggaggttgcgggaggagttgtcaggcaaagtgcacgcatctcagctaggtgcagtggtgtgttcctgtaatcccagctactagggaggctgaagtgggaggatcacttgaattggagaccagcctgggcaacagcatagtgagaccaggaagcaaaaaaaaaaaaaatgctgtcactcacatcttattcagtgaaggacttcagaggcaaatgtttctacctgaccctcctttctgccccacaggtctccaactggtttggcaacaagaggattcgctataagaaaaacatcggaaagttccaagaggaggcaaacatctatgctgtcaagaccgccgtgtcagtcacccaggggggccacagccgcaccagctccccgacacccccttcctctgcaggtggatcccactgtcaccccagctgactgttttgcacacttcctgcttttgttcccacttcctatctaggcaggatcatagcagagagggggccttttggggtgagagggaccgagctgagataggctggagatgtcaggggacagaggccattccagtgatcttagttctgcctttcttcccacgggtggccaaggaacagcctgctctttctgtgtgttggaatgttattttgtggataattggagtatagtagcatgtccccacaagagttgagagttgtggttcatcctctaccatcacgggctctattacactcttccctctctgcccccacaaggctctggcggctctttcaatctctcaggatctggagacatgtttctggggatgcctgggctcaacggagattcctattctgcttcccaggtcagatgcccatctcctctcgaatagggctttccccaactccatttcctctactttaggatacaagacctctttcctctgaggcttctcttcactgtcataccttcctctgctgcctgcaggtggaatcactccgacactcgatggggccagggggctatggggataacctcgggggaggccagatgtacagcccacgggaaatgagggtgagtggatcctgaagctcctctctgtccagttctcacaggacagaggggcattttccctagtaatgttgtgcccacacagggttcccagggctctctctgttttctgtactctgtctctcctttcaggcaaatggcagctggcaagaggctgtgaccccctcttcagtgacatccccaacggagggaccagggagtgttcactctgatacctccaactgatcttgcccctcagggtcacaggggtgggggctctcacaaggcgacttgaagaggacgcaggcttccagaggacaaaccccaatacaggagaagcacaagacagagaagggccaatggggtcatcccctccctaacgagactctctgtgctgggggtgctaattacatggcaggaagaatggggcctctaaggggagtgtggggtctgtctctcccttttttccatctttttcctctctcgctttctttcttacacagaaacatacacataccgagaaacctatttctcagacccctttttctcctctgtctttctctctccctctcccacacctcacacacacatactcccacttgcaactattctgtttctctcctgggctcccccactttcccttccccaccccacttgtatgctctggaatctgtggagacgccagccctgcccaatcagagatgccaaaaatggggacatgacttctggacagaggacatgggccacgcccccatgcatccccacccccgcccctccggacggcttacttacctcatacgcagctcatcttaaaccaatagaatcgctcggtggacgagagtgtctgactcagatatctacctcggagggagtttctgctactttagggaattattgactgggctttggggttgaacttttttttttttaaagaaagaaaaagaaaccctgggatccatctgttttttttgttgttgttgttgtttttgttgttgttggtggtggtggtggtggtggttcttaatttttaatttagtttggggaagtagcttgtttttttttttataaatatgttgatttcttgtcttttttttttatttcttactttcccatattaggggtgatagccaaaggggttctggtaagagaaagggggacaaacagaactggtaaagaggcccccctggctccaggcctgtccatcaggaagtaaattttacagggcaccaagctttgccccctaaaatcccttaggtgttctttgttcatgcaggcaggtttctgccgcatttgatgtggaggcagtgaagggcttgccctgctggcctctcatcccccttcttcccacaacccttgggcagggctggactcagtaattttgaggaaattgaagatgccatcttcccctgtgagtgacatgtctttaattttttaaaaaactactatttgaaaattggagggggaagaatgggaagggagttattgccaaatatgttaaatatgggttggggtgcttgtatatgtatcttcctcaatttccccataaatgaggtatctttttgtcacaccaaaatcaaggggtagggagagggaggaggttgcaaaaagccagatgtgggggaaaagtaacatcaacactgtcccatcctcagccctgaactagctaccatctgatcccctcagacattctcaggattttacaagactgtcagagtggggaacccctcccattaaagatccgggcaggactggggacaggttggaagtgtgatgggtgggggggtgggaggcatgggccgggggcagttctctcctcacttgtaaacttgtgtagtttcacagaaaaaaaacaaaatgcagttttaaataaagaaatttcttttttccctgggtttagttgagaatttttttcaaaaaacatgagaaaccccagaaaaaaaatgattttctttcacgaagttccaaacaggtttctctcctgttccccagccttgccttcatgatgcaggcccaattgcacccttgcagacaacagtctggcctgaaccctattgatgcaactttgcgcaatcaagatggggctccagtgggtcaccaggcagccctgatggactgatggaataaataggatcgggggctctgagggaatgagaccctagagggtacactccccatcccccagggaagtgactgtacccagaggctggtagtacccaggggtggggtgataattatttctctagtacctgaaggactcttgtcccaaaggcatgaattcctagcattccctgtgacaagacgactgaaagatgggggctggagagagggtgcaggccccacctagggcggaggccacagcagggagaggggcagacagagccaggaccctggaaggaagcaggatggcagccggaacagcagttggagcctgggtgctggtcctcagtctgtggggtgagccactccctcaaccccactgaccctccctgcagaaagcactttaaccccacaccccagtcgtcctagaacttttcccagaacccgaggaagtgcctttcaaggtccctcacccaccctgtccaaattttgttagccctcattcccttcctacccctctaccatggtgctatctcccaggggcagtagtaggtgctcaaaacatcacagcccggattggcgagccactggtgctgaagtgtaagggggcccccaagaaaccaccccagcggctggaatggaaactggtaagcggggctcctgttgcagcctcccaacttccagggagaccagcaatgatttggatccccgtcactctgcctcacagtcctttcccaaaggccttgcactgtttaggccctgcttctctgcttctagaacacaggccggacagaagcttggaaggtcctgtctccccagggaggaggcccctgggacagtgtggctcgtgtccttcccaacggctccctcttccttccggctgtcgggatccaggatgaggggattttccggtgccaggcaatgaacaggaatggaaaggagaccaagtccaactaccgagtccgtgtctaccgtaagaattccagggtcttctccaaggcctccctcttacctaagaaaaagccttcaaccccagccttggcccatgagggcctctgacttccactggcctcatttccacacacagagtttgagaaccttcacaattacagcctctgactggatttttcctccttcagagattcctgggaagccagaaattgtagattctgcctctgaactcacggctggtgttcccaataaggtagtggaagaaagcaggagaagtagaaaacggccctgtgaacaggaggcgagtgtgtgtgggtgtgggtgtgtggcatctctcattttcaaaggattctgaggtcaccactctttccccaggtggggacatgtgtgtcagagggaagctaccctgcagggactcttagctggcacttggatgggaagcccctggtgcctaatgagaagggtgagtcctaaggtgccccccaagctgccttctccctgatctcactcccacacccaccctgggataatttgtcttatcctcccatcataggagtatctgtgaaggaacagaccaggagacaccctgagacagggctcttcacactgcagtcggagctaatggtgaccccagcccggggaggagatccccgtcccaccttctcctgtagcttcagcccaggccttccccgacaccgggccttgcgcacagcccccatccagccccgtgtctggggtgagcataggtggggagggccccaagctcacgtgagcacgttctggaagtctgacccttagggaaagagggagtcaagcccatggccactgggatcactcacaagtgtaactctccacctcaaaacccttccaactcccagagcctgtgcctctggaggaggtccaattggtggtggagccagaaggtggagcagtagctcctggtggaaccgtaaccctgacctgtgaagtccctgcccagccctctcctcaaatccactggatgaaggatgtgagtgacctggagagaggggctgggaggtagggtgaaccataactagcaacagggagggcagagggctaacgagggaaaggcaggctaggagctgaggaggaagagagggtatctgaagatatggagacaaaaagacaagggttttgaaatagtctcctctccccttcccccaccagggtgtgcccttgccccttccccccagccctgtgctgatcctccctgagatagggcctcaggaccagggaacctacagctgtgtggccacccattccagccacgggccccaggaaagccgtgctgtcagcatcagcatcatcggtgagacctctccccaagccctacagaccctgggactagggtgcaggacagcacaggctctaatttcctgccccattctggccttatccctaacagccaccccacctctccctccatgcacccacacccaagcctcccctaccccacccaaattctgccaagagagcagccaagcctctcccttcttccctctgagctaaaaaaaggaacagacggctgggcgcggtggctcacgcctgtaatcccaacactttgggaggctgaggcgggcagatcacctgaggtagggagttcgagaccagcctgaccaacatggagaaaccccatttctactaaaaatacaaaattagccaggcatggtggcacatgcctgtaatcccagctacctgggaggccagctacttgagaggctgaggcaggagaattgcttgaacccaggaggcatagattgcgatgagccaagatcgcaccattgcatgccagcctgggcaacaaaagtgaaactccatctcaaaaaaaaaaagaaagggaaagactccactggggctcccactaaataaccctctctcaacccgaagtcttcctttctgactggatccaactttgtcttccagaaccaggcgaggaggggccaactgcaggtgaggggtttgataaagtcagggaagcagaagatagcccccaacacatgtgactggggggatggtcaacaagaaaggaatggtgagtggtggtggctgtgctctcaattttccctgtctccgtacaggctctgtgggaggatcagggctgggaactctagccctggccctggggatcctgggaggcctggggacagccgccctgctcattggggtcatcttgtggcaaaggcggcaacgccgaggagaggagaggtgagtggagaaagccagacccctcagacctagggcttccaggcagcaagcgaagaggggtcggggggtggaacgacaacgtgccgcattccccccaatctttctcctcaggaaggccccagaaaaccaggaggaagaggaggagcgtgcagaactgaatcagtcggaggaacctgaggcaggcgagagtagtactggagggccttgaggggcccacagacagatcccatccatcagctcccttttctttttcccttgaactgttctggcctcagaccaactctctcctgtataatctctctcctgtataaccccaccttgccaagctttcttctacaaccagagccccccacaatgatgattaaacacctgacacatcttgctcttgtgtgtctgtgtgtgtgtatgagacacaacctcacccctatacccttgagggccctgaaggaaagggactcacccccatacttcaccatactataccaaacatctactcaagttggggagaagatgcttctgtcgggggtgggggcgaacttgggaagagatcccatcaatatatttcaccttttttattgaatttgtattaaaggaggtagtgagggggcggaagcacttaagagtcagaatccatattagactctggggagtgaaaaattaaattaaatcagtaagatggggagtgggggaagagtcagagggaactttgcccacctttgaagatcaaatcaagaaatcagggaaagcaaagacttaggagaggagaaagacattctctcaatccatcctccttccccagggcagagaattaaacaacgttactgagtgagcctctgagcagaaggctctcccatctatgcacagacttcactcctcctccccaggccttcctggacaatgtccagggctggccttagccaacagaaatagaggggtcaagggggtccaggagtacggaagggtcagcagggaccctcaatactgattcttctctggctggaggtgggcaggaagcagacatagctcaaatactgagcagccaaaaaaagaagaagatggcgagaaacaggaagagggaatcctgccagctggaggctgggtgaccctgtcccagatccacacctgtgggagagaggaaagctgtggaagcatatgctcctaggctgggagggggcctgaggggattcacagggctccctgatgggagctgagtgtgactcttacctgtaccccggcggaaaggctcatgggcattgaagacggtggtgaaaaagccaaagggaaaagcaccaacaccaaatgagaagtggaagcccccggtatcaccaaatggctggaatccctagggaggcagaaaaagtcagacgggaagccggcaaatctgtcaaggaagggacacaactggacaagaagactcacccctctgctctccggagctggtctctggccctgggggcggggtggagtttttaatctgaggaagtggagagagaaagttaacagggatttttctcctcccatcttccacaccgttttccaagggcagaagccttcaatcttccctaagcaacacctccagtctctcacctgggatcctggggcttctggctccctcgcccataaagcgggacaaccttctctctgctgatcccagctttacatactggacactcttgccgttctggccgtgtctccagccactggggagaaaaaaggtggtttccagtatacaagagggtcttacagctcctcagacctccccatttccctcttcatctcctgagtacgcacctgatgaagacatggccaactggatgggggagaaaaaaaaaaaaaggtcaaactagctacagaaaagagagacacagaccctagacttcgcagaatcccatctaacccctcttcccaagcaacctgctgttgcttttcagattttctgcaacctctaccatgccagccaacttagttagccttcctgcttgtctgatcttccaacacctaaagctctgtccatcctcaacacactcaaccctctcctttctcctctccccaacaaacacatacaaattttcgtgccctctcttttctgcctttcaagttaatttctaatttccttcagccacctctttctgggtctcctcttttcaaccccaaccccatcactccaaaccaaacccctttactagcacattcccccattactcactttcaagctcaataatgtccctatctttatgaccctttaacctttcaagtctgcctctccacagtgcccttataccagccccctcccagatctcatctgaatgtgatccatatttcctggttctccccgactcaactgatgcgtgcctcccttaacctttgtgtctcacttgtttccacctgcacagctaagacccctcacttctctggggtaaggtggctcgggtctcacattgtcctgccactccccgccccaccttctcttctcagcacatcacgtgcctcagctcctggttcctaagacctttctttccacagatctcgaccgttatactcccacccacacataccagcaaagtcttatgtctcctgtcgggcttcacctatgggaacgtgccctccgattatctgtatgactgtatgattattcgctcctagcctctccagtatataagcgagacccaccacctcccgcccccctcctcgattctcaccagtacaggtggccacacacactgaccacagcttcccgagcagtctccaaacatatattacattcgaaggtcgcgcccgccccgccccgctcgcgatttggcccttcggggcccccgtcctcctcctccgctgctgccatggccggttttgtttcgccccacgtacccttcagtccccccaaatacacatacacacgccccaacaaaccagaaaccacctcctgcccacgatcgttgggcaggcttcaaggtttcctaatcactattggtctgaatgcctgccagtcacaaagaattcaaaagaaaggattggcccaaagggtaggggcgggaaaaggttagtgcagtcctgccttcgcacaatggctattggctgatacggtctaagtcaatgtgcaatgccaagggattggtaataactcgctacacgctgtcgcctggccaaggagggctttattcgtctgagtagttgtcagtcataaccaaagccataagcaatttgctcgggactacctatagacctcgcccactataagcccctttctttccttcgcttcctcttttagagaatgtccggattgctattggactttggagcgtatggctccaaatcaactcattggctaaaacttgacggaaaatggtggttaggtaaaacgcgcctgcgcagcacgcggcgggacgggggtgggccaatcctgtgagggtttaaccttctcttgttccacctcttcacccctatcttgtcgccatggtgactgctctacaattggcgaggcttgcacttcaaagtcctaggctcgcttcatccgggtccttcagctgtggactttctgctgattgggccttttccttttcccctgattggccgacatcgggaaagacggcgaagagctaggaaaagagggaaaacactagggtcgcagggttcaaaatggctccaacctcctttggtgacgtagagagcagaacttgggtctgcccctcccttttagttaagggagcagaactgggattagcccgacgtttggatagtgggaacatcgatctgcggcgctggtgttaacccaactcattcggctggacgactcagccctccccatattaggtgatttacagagcaaaactgaactaaaggcccacccctttcttaatgttgtacacagagtagaacaggattgacttcaactccgttttaaaccttcagagcaggaaagctctgggctcaacccctttgtgagtggtgcaaaagggacaaagcccgccccttttaaggagacccgcggaggctagacccgccctttcctctttataatttgcccatcagaaatagggtcttcttcccaggttggaccccggggagtttgggcttttcctacaatcactgaccctcactgtgactaaaggagcagaattaggtaacagtcctcccactaccaatcctcttcccgagggcatgtaaactaatgcagggtaaaggtgtggctagaggggggaccttgataaaagatcccatgtgactcaagagtaaggaaagatgagaagttagcagttgcgtaaagaaggactggggcagatgaggattcaggaagcttgaggtttaggaaggaagatattgagagggaaaggtggaaatgaaggagagtgaagtgatggaatgatcctagtaaagggataatgggagtggaggaagagaagagggggtggaaaactagatacatggctaccaaattaaggaggcacgcgcattccagaggaatcggcattcttcctcactttttatttttctagaaagcacccctgaagccaaatttccattggaagaaaagatgtacccatattgtatgttgtgagaaggggttgtctcagcttgggcaagtaaggagactgatacgaaggaagtaggaaagaaaaggtacagaggtaaaagagcatggaaaaggaaagggtcagggataaggccaaagagatctcttctctttaaaggccagagaaggcaggtggaggggggagctggactgctgggagatagtgagggacaaagggcaaaggaaaccagaccagaggactggagagtgagatggagtgagatggagtcctggagagaaaaagaagagaggtgaacttaatgcttgtcatatggtaggtagatgcttgataaatgtttagaattgaatgggtacgggaaaaggggtccttaagaatagttggggggaataagcagcagataaccggagttgagaaaaaaagagaccaagtaaaagtggcagttaaaagagagctgatggagaataaaggaaggaatgtgcggaaggaggaatacagcaccaggggatccagagctgaaagggagttagagaaaaaaaagatgcagctggagccagagatgggggcaaagaccgagggagagccctgggccggggctcgcaagaggacactggtagatgtggggaggagatgccagagtttctgggagacgattggcaaaacaggctgcccatcaccgccctccacttcctggccggccccggaaaccagcaggcgttggggaggggtggcgggggaatagcggcggcagcagccccagccctcagagagacagcagaaagggagggagggagggtgctggggggacagccccccaccattcctaccgctatgggcccaacctcccactcccacctcccctccatcggccggggctaggacacccccaaatcccgtcgcccccttggcaccgacaccccgacagagacagagacacagccatccgccaccaccgctgccgcagcctggctggggagggggccagccccccaggccccctacccctctgaggtgtgggcgggaaagggatgggaggaggagggaagagggtgctgaaagcgactaggatgaggggaaggggagagattgggtctgggagggccgactgggggagagggttgctggggaaaggagaggggccgactgggaagagggttgctggggataggagaggggacctgagagggaggaaggatggaagagacctgggagggaggagaaatggaaacccttgtgaatttgggactgggagcgtgcacagggaatcctggagagggaattccctacaccttccccaattccttttcttgccctttgaccccacatgactcttgaagggtcatgaggggagaaggccagcagaatttgcctcttaggaatacccttaggtgcctctgtttccatctaggcacaggacctcttgtttctcagtggccttccacactgctagacccttactgacacacaaatgccttatgggagccatgttttctacattgagtctgtgtgcctttgacatgtttaatggcttgtgtgcaactaggttgtcccaatgctatccataggctgtgtagaaatggtgtgttattttctatcagaattgcccattcttcattcttgtgtccatgtctcacatccagttttgacatgttttaagtaccgcatgtgtgtgagttttcatatattgcacctgttctataatttcatgttacttgcacattttatgttttggcatgtttatttcagcatgtgaaggttatataccttattttgctttggctgacatgtccatggtcctaccatttgcagtagtcttcatgtgtgggatcccatggcttggctgaataccccacactctgatgtctgactgaattggcctgtttgctgtgttttcccagtcacagttcacagaacacatgtgtatgcgcctttgcatgatacactgatgtaacaggaccatagaatgtgtgttataaatttgtcatcagtatattttgtgagccgtatgctcattaaatttggccctccattgcatttctaaatccttggacttttgttctccaaagagggtcacttaatatcaagtgttaagagaagaaggtaactgggtctccaggtctgcaaagaaccatccctgcatgccttaccttggtgacctccctggcccatacctctctacacaaacattatctttccagtggctgtgtacagtctgtgtccatgagctcaatgcatgtcacagggtcaatcctgctgtgaaccccattgttggtatttatttatggacattatcctccattctttgcactgttggcacacatttgatgagagcagcatctttccctgtggcatcttgatcccattcggtacatttctcttgtgagatgacctcttcctgattattgttactctgccttcattatggctatgtattgcatgtatctattcagagtcggttaccattaggcttggtgtgttcgttactttctcagtgacttcttttagtagtcacttctactcaagaggataactatctaatttgtgatcagaaccgccatctctgtcattaactgtggctctatgggtgggtatacagccttagaatctgttcagcaagtgtttattgagcacctactccatctcctattgtcctggcactggagataagacagagtccctgtccttaagctgcttacagcctaaggagggaaacaaaaacgccagtcaacacatagtgtgttgtcaagatcagtggttcttaaattcaggcgcacatcagactcaccagagggcttgttgaaatacagattgctagccagccacgatggctcacacctgtaatcccaacagtttggaaggctgaggcaggaggatcgcgtgagtccaggagttcaaaaccagcctgagtgacagagtgagaaaaagaaaaacagattgctggacctaatgcccagaatttctgattcagtagatctggggtgaagtctaataatttgcatttctatacttcgagacccgctgatcaagataaaagtgtaaggaaagcacaggcctggaggggttcaggcagccctccaaaaggtgacactgagctgtgtgaggcaggagaagagacaggcattccagccaaagggaacagcatgttcaaggtggggaagcatgaaagatcatggtgtctgaggaactgaagtgaatcagtttgactggaacaaagagttttgtgaggatgtggtcgaagatgtaagcagaagtcaacttatcaagaagagcctttaggcaagacagggaaatgctctgtgtttcagaaaaatctgtgctaacagaaaaatctctgtggttgctacgtggaagatggattggagggagttgggagcctactccacatagttcaggggagaaatgatgctgttctgaacttgtaggggcagtgggatggagcagctcagaaagcctacggtattccaactggcagggtctcctgtttcctctattgcctgttaccttctcgcttggcaataggcttacctttgagcatagcccttcccatcatgggaagacagtgcctgtggcctcagtaggaatgacaggtatttgcctgaacaccctttttgtgaattgttaccctgcccccaacactggggcagagtggaggaaggaggaagaacctagaacacaggttctgtgttcctgcctctcttcctcttgagccctttcctctcccagggcaagtgctgttaggtcacctttactccattccctccttttttcacttggtgaggcctcacacactgtacctgcccacgcaaagtgtcactagaaggaagggaaagggtagtaggattcgtttgcctgtctggaggtaggattggtctttgtagctattccaggtatgtccataagtttacctaggaataggggagctgcctgggtggagagggatttttctagttatgcatttacattcttttatctgtcactgggtgtaattataaatttgtgtctatgtgtgaacatgttagtctttgtatgactgtgtgtctgttggcattagtgacacgaacttttaatcttgccatttggcccttgggtatatggctgtgagtgttctgtcacaatcaccatatatgctgtgtgctgtgttcgtatatatatatgcaatacataccagtgtcagcgtaatggagtggttaggaacacaggcggcttagatttaacctagaaactgctgtttaggagctgtatgacctcaggtaagttatttagcctccctgggcctatttcctataaaatgtaaatagtaatagtactttctagactatcatatgcatcattttaagagtttaacttaatgtatagaccagtactgttctacagaaatataatgcaagccacaatgtaatttttttatggtagccacatttttacaaggcaaaaagagtgaaattaattttagtaatatattttcttgaatctgataacatccaaaagattataatttctttttttttttttggaaatggagtctcactccattgcccaggctagagtgcagtggcgtgatcttggctcactgcaacctccgcctcccggattcaagcaattctcctgcctcagcctcccgagtagctgggattaaaggcatgcgccaacaggcccggctaatttttgtatttttagtagagacggggtttcaccatgttggtcaggctggtcctgaactcctgacctcgtgatctgcccacctcggcttcccaaagtgctgggattacaggcgtgagccactgcgcccggcccaagattataatttcaaaatgtagtcagcataaaagattagtaatggatatctcacattttgttttttattcagtctttgaaatctgatgtgtattttacatttccagcacatctcagttcagactagctgcatttcaagtagccacatgtaggtggtggctactttctcggacagcacaagtatagaccattataagacccttaccagctacaagtgttagctattattcttgttgtcatttattatcaggtatctgtgaattgtagatgtctgtgtcttgtgtctcttgtctgaatatatccggagcctttgggaagagtggtgggagagcagtcctgagctctttctccaccaccctcatcctagagagccttcctgggaaggtttcaatgagacccctgccccagtttgtgtctcaggcccttgtcctcatagcaccagcccccagccctgccttctgtgccttgcctaccccactctcctccagaaaccaggctgattgtcccttgccccatcccctgcaggtggccagaatggatttgtggccaggggcatggatgctgctgctgctgctcttcctgctgctgctcttcctgctgcccaccctgtggttctgcagccccagtgccaagtacttcttcaagatggccttctacaatggctggatcctcttcctggctgtgctcgccatccctgtgtgtgccgtgcgaggacgcaacgtcgagaacatgaagtgaggggcaaggggtcttgggcaatgagggaacctaagggtacaaagtgagtagtggattgggggaagggggcatggtgtgtgtagaaaagactgagagagaccagagacagggaatggggagaggactgcaaaggtggtcagaaagacagtaaggtggggggagctgaggcatgcagatggacatcaatggatcccactgggaccccttgccatgaccccacaggatcttgcgtctaatgctgctccacatcaaatacctgtacgggatccgagtggaggtgcgaggggctcaccacttccctccctcgcagccctatgttgttgtctccaaccaccagagctctctcgatctgcttggtgagaccccaccacagggcacacctcccccagccatgcctcccctcctgaaaccttccctagaatatcttctcctagagatcctcaattccccttcctctgggacattgcccccttgcctcccactcaggccttcattccctgggtagaactgccctcataagcagggtacatatacttttggtcaccctttccttcacttggggcccccctccctgcctagtctcctccttcacctccagtccctaccagagggtgatgagctgggtgaggtgggttgccttctgtgacactctgcctccaccccgatcctcacccactcccaccctgcccaagggatgatggaggtactgccaggccgctgtgtgcccattgccaagcgcgagctactgtgggctggctctgccgggctggcctgctggctggcaggagtcatcttcatcgaccggaagcgcacgggggatgccatcagtgtcatgtctgaggtcgcccagaccctgctcacccaggacgtgagtcatcctggggaaatgggggattggagggatacagagtagaacagttgtaaataaactgatatgcagggccagtgggcctcaaaggtcccattataacatcacacctattctgactcctccatatgtatttgtcttctttgaccctctttctcccccaggtgagggtctgggtgtttcctgagggaacgagaaaccacaatggctccatgctgcccttcaaacgtggcgccttccatcttgcagtgcaggcccaggtgactactgctcttcgttctgctactcagctgccaacccccaccattccctcatctctgggcaggggcttattgtaggagtctctgaagagagctgtggactgacctgctttaacccttccccaggttcccattgtccccatagtcatgtcctcctaccaagacttctactgcaagaaggagcgtcgcttcacctcgggtgagggctttgagcagttctggggtagggtgtgtccggagaggctgggaggacatccctgtgaggcagggggatcattcagtgtcagagccatgagatgtctacacagtcatctagtctaaccccacatcagccaataagtctttactaagcacccaccataccctgccagatgggtagcacttggtcccaccaagagaggctgttactaatcttaacaggaaagataaggcctgtgtgcacaaagctgtaatgaataacactcattcagcagtaaatgccaaacccagaggaggggggctggaggggtgctgaggagatgtctgaactggggattggagaaggctttgtataggagaagggcctcagaagtggcagctggcaagcccagggatggttgtccagggttgggggaagagaactgaaaggttgaggaagagtatcactcggaagctgggccccacctgtgggcaaagacctgggtggacaggccatgatggtgctccccttgccccaggacaatgtcaggtgcgggtgctgcccccagtgcccacggaagggctgacaccagatgacgtcccagctctggctgacagagtccggcactccatgctcactgttttccgggaaatctccactgatggccggggtggtggtgactatctgaagaagcctgggggcggtgggtgaaccctggctctgagctctcctcccatctgtccccatcttcctccccacacctacccacccagtgggccctgaagcagggccaaaccctcttccttgtctcccctctccccacttattctcctatttggaatcttcaacttctgaagtgaatgtggatacagcgccactcctgccccctcttggccccatccatggactcttgcctcggtgcagtctccactcttgacccccacctcctactgtcttgtctgtgggacagttgcctccccctcatctccagtgactcagcctacacaagggaggggaacattccatccccagtggagtctcttcctatgtggtcttctctacccctctaccccacattggccagtggactcatccattctttggaacaaatcccccccactccaaagtccatggattcaatggactcatccatttgtgaggaggacttctcgccctctggctggaagctgatacctgaagcactcccaggctcatcctgggagctttcctcagcaccttcaccttccctcccagtgtagcctcctgtcagtgggggctggacccttctaattcagaggtctcatgcctgcccttgcccagatgcccagggtcgtgcactctctgggataccagttcagtctccacatttctggttttctgtccccatagtacagttcttcagtggacatgaccccacccagccccctgcagccctgctgcaccatctcaccagacacaaggggaagaagcagacatcaggtgctgcactcacttctgccccctggggagttggggaaaggaacgaaccctggctggaggggataggagggcttttaatttatttctttttctgttgaggcttccccctctctgagccagttttcatttcttcctggtggcattagccactccctgcctctcactccagacctgttcccacaactggggaggtaggctgggagcaaaaggagagggtgggacccagttttgcgtggttggtttttattaattatctggataacagcaaaaaaactgaaaataaagagagagagagatctgggtgttggtggttgcatttgttaaggaattgaagcagttcttgcccaggcaacctgcccccagccagaagactcaggggcaggccaagaacacaggcctccccctttcttcagctctctgaagtttccattgttcattgctctttggtggctgatagccttatctgcagctcacagtcggccaatcccagaggattagtgggtccggtttctgtataaattagggggcaggggtgctgtagaggcttcttatcgatgattgacgccgaggcccaggctgttgtcctcacaggagcctggttaatgacatggcagacacagtggctgtggtcagcctggagtggactacactgccactctcaccaaacaataagtgaaactgttgggctggggacaggatttcagaagagaacgatggtaaagtggagaggcatgaggatagtgaatgttggagaggggcttggaggaaagagggaatgcctgaatggagaggggtcttggggaaagttggggaatagaagtcaaggcgggaggagtgtgaggactcacaggcacctagcctctcctccagcagcagcacctggtcgctgagagattcgatccggtcaccccggccccacagctcagccacctgttctggctgcagctcttcaggcggcacgggcagcaccgctctgacccaggccccagcctgaccggcccactagaaaggaagagatgcctcagggtattgacagtgacgtctggcctcgccccacccagcaggcttggctcacctgctccagccgctccaggcgccctcgcagctcgtgaatctcctgcttcagagcgcgctcatctttttccgcctcccgaactagggacaaaggagaccaagagtgtgaccactacccgagcccggacgcccgtcccgagtccctcgggtggcccgtactcctgcccactcaccggccacgctgagtatgctggcactggttgggggctctggggacccctccatgcaggtgcgcccgtccacgcctagcactaggtcatgggggcagccgcaggtgaagctgcctgccgtattaaaacaatggtgcgagcagagggtgatgctggtcctacattcatccacgtctagttaccgaaaaaaggaaggggctgagagagggggcgggggcaagcacctgggtaggtggggaggacaagctgactcacccacatgacagtgcttccctccccagccgggggcgcactcgcactggtcaggcctaacgcagacgcctccgttcaggcaaggcttggcgcagatggctgaggacagaggaagtggggttcagactcaaaccgacgacccagctccccagctccgtggggcgcgcctcccgcaaggcccggaagacccagcctcaccttcacaggtgagcgcccccgggtgccgcttcttccagccctggcagcacactgcatgggtctgctgaacctcccgcctcacctcccgccacataacgcggtacatggtcctggaacacagcgcccggctcaggaccctgagtacgggtcctagttggggttcttggggtcccatctccccatccctcacctgtaagtgctgcagatgcgcctcccagcgcacaaggtcaggtagggcttgtacactggttggctgtaggactcgttgtagtggagcgggaccaccagtgtctgcttggagcagactccctgactgcgtccatgccagaggatgaggtgggagagattgagtaggccaggccctggggagccaggagtcccacttccctcaagaggctactgaggccccccgctctccctccagatgacagcctctcacccccattctaaacttacagttatgttttgcctcctgtgaagccccacccccagcagaaggctcctgagaagagctcaccccgggccctaccccctctgttgtcacctctctctgagggatccacccttggccccctcgcctggtatcagtagcaggaggaaggagaatccgcctaagagagtgcacagctcagccctggaccccatgattcgctttgacgctggaccctacaggctgcaggcaagaaaaggttaatggatgcccgtcccctctcctattaatttctccagcactagtccctccaagggcactctgcaggtaccctctaagggagtcaggacattcacttttacatactagccaccaggattgcctacacctgtgtgtacaacccaacactatcctgtccttagcatatcatgatcctttcagcatcataaaagctcacaccccagcacactccctccacctcccctctaacctacttacttctaatcccctctgcacaacctggagggacacacagtcaaccctccccttatgaccctcctgtctttttttgggtttttttttgtttttgtttttgagaaggagtttcgctcttactacccaggctggaatgcaatggcatgttcttgcctcaccgcacgacctccgccccccaggttcaagtgattctcctgcctcagcctcccaaatagctgggattacaggcatgcgccaccacgcctggctaattttgttttgttttgttttgtagggtgtgagggtatatagctagggttttttttttttggttttttttttgttgttgttttttgagacggagtctcgctgtcaccctggctggagtgcagtggtgcgatctcggcttgctgcaagctccgcctcccgggttcatgccattctcctgcctcagcctcccgagtagctgggactacaggcgcctgccaccacgcccggctaattttgttttgtatttttagtagagacggggtttctccatgttggtcaggctggtctcgaactcccgacttcaggtgatccgcctgccttggcctcccaaagtgctgggattacaggtgtgagccaccatgcctggccaaccctcctgtctttaacatgccctcttataacttcataccttcaaaaccctagctggttgggcgcggtggctcacacctgtaatcccagcactttgggaggctgaggtgggtggatcatgaggtcaggagttcgagaccagcctggccaagatggtgaaacccatctctactaaaaaatacaaaaaattagccaggcgcagtggtggacgcctgtaatcccagctactcgggaagctgaggcaggagaatcccttgaaccctggaggcagaggttgcagtgaaccaagatcatgccactgcactctagcctgggcgacagagcaagactccgtctcaaaaaaacaaacaaaacaaacaaacaaaaaaaacccctagctatataccttcacaccgtacacacaaaccaagcacctggaaactccacacctttcacacactgctactcccctcacatacccacaccgtcacataacgccctaaatgcacatcccttgctccaacaaaacaccccgcaactcatgcccaccctaaggctctgagtaaaccccactctttccccatttgaaattctctccccacttgccttcctctctctctccattcccacctggcttctttctcctgggaggcttcaagcagaccagcctcagcagaagcagctcagactggtgggtgggcctggcaggctaagaaggagaggaggggctgggccagagagtcctcccattcctgccccctcccacaagcctcctccttagctccagcagggtcagctcagtagggtcaagtcccactaccctcatccccaccccagcaaagggctccctagaagtatctttccaaccctctgaggcccctatttctggactccccagatcagaagctatgagctctgtaacaccaccagtacccccttgaacccaaaacagactaggggagagttagggggcagggagagaaccagctgcagggaacaaagcagttcaggttatgggagaaaaagcaagatcagctgaggaaagctagaagggcaagtcgtcacaaaggggcaggggggcagcccagggcaccaaggggaaaactgcccccctctcttcatgacatttgttagggcttagggggaacagaattgagtcagccaccaccccccatgccagaacagacagggccctattgtctcagccaaaattccttctttcaaggaagaggaggctcattgtccagccctacacccagctctggcccacaaagctcaaaagcggcacaacgaatgcccaccctgaccctctgccccctcgtctagcctgggggtggcaggcgcattccacccatgaggctgaggcccaaaccactggagccctgagcttaaccccccagtcttggggactgggagaggaagagaattgtcttcagcaggaaagaacccgcagagaaccaggaacccacaaagaatgggcattgagagagagcggaaacaccaagggggtccccaccctagaccaggcatctgggcacccaggcctcaggctccgcccccaccctccttggggagccaggtcccctccacctggaaatgagccaagtcacactgaggaaatggaactttatttccataaatacagggataacacctattcaaaggtagttaaaagagggcctggggcctcaaagaaactaggctctcccaggggggtactccaacactgatcatagggactgggggatccccaaacctgagatgggcctcataggccacagatattccccaacactgacacttcaagaacggaactgtccccataggggagcctcagaaccccactctcatgggtagtccctcttaggagttgggagggctgatgtcaggggactttagagaaaaaagggaacatggggaggagagaagctaaaaatgtcctgagtggcctggaaggagacccctgtggtgggcagggggtgggttctccacccatacagccagatacggaggagcagcagcagcaaaagcagccacaagttaaaaacatggtttctcacttcccaacttcggccttgagagaaagggacagcacggagcaatcccccaaatgagaggacatgaggtaggggaggcctggaattgtcattcatggaggagcagaggaagggggttctgggaggccaagtctctactaaaaccccgtctctactaaaaatgggggataatatgggagcaatgaggtggtcacaggcacaccaaagcctgacatctgctttccaaggccaccacttggtctctggaccgaggagttcctggggacccctgaatatatcctcaggagagccaaggttcaatgcaggtctcataaagggtacggttggagtgccaggctgtgtgggagataccggccattggacacctcactatggccccccgggccaatagagtcttcaacccaaaagaatcccgcagataaaccttcaaggtggtcgaaggggcgtggaagcatggaagagagacacaaggagagacaaagtgagttactgctgggatcctggacctcctccccacagggtgaacccttcagctcaggagtcacagagagggctctggaataaggtgggacagcggctagaaggggaagtaatcccagggggctcaccagttgctcctccatctccaggacggtctcatttgcatcatagaaaccaaagaagctacaaagagatttggggggaggttatcagaagagctggagaaaatctggccgggcgcagtggcacacgcctgtaattgcagcactttgggaggccaaggagggcaaatcacctgaggccaggagttcaagaccagcctgaccaaaatggtgaaaccccatctctactaaaaatacaaaaattagctgggcatggtggcagatgcctgcaagcccagctacccaagaggctgaggcaggataattacttgaacccgggaggtggaggttgcattgagtcgagatcgcaccactgcacttcagcctgggtgacagagcgggaccccatctcaaaaaggaaaggaaaggaaaaaggaaagaaaaaagaaaaggaaaaaagaaaggaagaaatcaaggtgggctaaggtcccaaaggaacccaaggcctactggggagacaggtagcagggaggacactcaaaactaccttactggatataatgtacttcatgaggtgatacactgaagatacgacctcacttctgtagaaaccccatcaaaaatgcattactggccgggcgaggtggctcacacctgtaatcccagcactttgggaggccaaggccggcggatcacctgaggtcgggagttcaagaccagcctggccaacgtggtgaaaccccatctctactaaaaatacaaaattagctgggcgtggtggctcaagcctgtaatcccagcactttgggaggccgaggagggtggatcatctgaggtcaggaattcgagaccagcctggccaacacggagaaaccctgtctctactaaaaatacaaaattagctgggcgtggtgggcgcctgtaatcccagctactcaggaggcagaggcaggagaattgcttgattctgggacgcaaaggttgcagtgagccgggatggcgccactgcactccagcctggcgacagagtgagactttgtctcaaaaaaaaaaaaaaaagaggccaggtgtggtggctcatgcctgtaatcccagcactttgggagaccaaggagggtggatcacctgaggtcaggagttcaagaccagcctggccaacatggagaaaccccgtctctactaaaaatacaaaattagttgggcatggtggtgggcgcctataatcccagctactcaggaggctaagacaggagaatcacttgaacctggcaggcggaggttgcagtgggccgagatttgccattgcactccagcctgggcaacaagagtgaaactccaactcaaacaaacaaacaaacaaaaagatactaaagagacgtaacaagatcatgcaactcaagatcctgatttggatcttccactgtatatttttttctgtaaggacagttggaaaaatttgaataatctgtgagcgcatattcaggaaaatttgaatctatgtttatatttaaatataacattaacgtatataaataaatgtatatatatttagagaaaaaagatattaatgtaaacatgacaaaatgttaacatttgcgaaatctaggtgaggagtataaatgactgctttttgctattttggtaacttttttttttttttttgagacagggtcttactctgtcacccaggcaggagtgcaatggtgagatctcggctcactgcagccttggcctcctaggctcaagcaattctcgtacctcagcctcccaagtagctgggactacaagggcacaccaccacgcccagctaatttttgtattttaggtaaagacagggttttgccatgttgcccaggctggtctcaaacccctgggctcatgcctcggcctcccaaagtgctaggattacaggcgcaaacttttcttaagtatgaaattatttcaaaatagaaaggtcttaaaatcctttttttcttttttttttgagacagagccttgctctgtcacccaggctggagtgcagtggcaccctgtcggctcattgcaacctccgcctcctggtttcaagttctcctgcctcagcctcctgagtagctggaactacaggcgtgcgccaccaggcccactaatttttgtatttttagtagagatggggtttctcaatgttagccagctgttctcgaactcctgacctcaggtgatccacccgcctcggcttcccaaagtgctgggattataggagtgagccaccgcacccagccagatggagttaaaatcttttaattaaaaaatattggccaggcaaggccgggtgcgtgggctcacacctataatcctagcactttgggaggccgaggcgggtggatcacgaggtcaggagatcgaaaccatcctggctaacacagtgaaaccccgtctctactaaaaatacaaaaaaattagccgggcgtggtggcgggtgcctgtagtcccagcgactcaggaggctgaggcaggagaatggcgtgaacctgggaggcagagcttgcagtgagccgagatcacgccactgcactccagcctgggcgaccgagcgaagactccaactcaaaaaatatatatctatctatatatagagagagatatatattggccaggcgcagtggctcacgcctgtaatcccaacactttgggaggccgaagcaggcggatcacaaggtcaggagatcgagaccatcctggctaacacagtgaaaccccgtctctaccagaaatactaaaaattagccaggcatggtggtgggcacctgtagtcccagccacttgggaggtgaggcaggagaatggcttgaacccaggaggcggaggttgcagtgagccgagattgtgctattacactctagcctgggcgacaagaacaaaactctgtctcaaaaaaaaaaaaaaggaagaaacagtgacttggaacattaaaaatgttatataaccatgagctatcactgtcattcatagggttgtggtagatgtgaaatgacatgatgtacataaaactcatcacttactattatattattacaatattttaagagatgtcctgccttcactgaaaactgtccagtgccttcccatctcactcagaatttaaaaaaaaaaatcaaaagcctggttaccgggactgtcgggaaatagggatgaggatatatatatatatatatatattttttttttttttttttttgagatggagtttcgctcttgttgcccaggctggagtgcaatggcgcaatctcagctcactgcaacctctgcctcccaggttcaagcgattctcctgcctcagcctcccaagtagctgggattacatgcatgcatcaccacacccagctagttttgtatttttagtacagacagggtttctccatgttggtcgggctagtctcgaactcccgacctcaggtgatccactgcctcggcctcccaaagtgctgggattacaggcgtgagccaccacacccagtctattttttaatgggtatacggtttcagtttggggaaaaagaagttctggagatggatggtgctgatgggtgatggttttacaatgatgtgagtatacttaatgccacaaaactgtacatttttaaatggttaaaatggcaattttatgttatgtatattttatcacaaaaaaaagaaaaaaaaatatcaagggccttaccttgacctgctaaggtttgacatgcctggtcccctgctaccacttttagctcctctcctgtcctctccccagctccttgtgcactagccatgctggcctccttattgctcacacgtgcttcagggcctctgcaggtgccagaccttctccctggggggttcttccacccagagcacaactccctccttcacttccttcagtctctaattgaatggtgacttttccaggaggacttcttcggccactattgaaactaggccccggacatcctctaatcctttcccctgccttattacctgacatatatatttgtatgtatgtatcagctatcttacaaactagaatataagctacataacattagggacttctcttttatttaccactgcatccctagggcccagaacaagcctgcgcccataatgttgaataaatatttgttgagcaattcaagtagctcaggtgacattacagatcacacatggtgacctataacacaggcaagcacatagtaccatggagccatggatttttttctaaggaataggatggaggggacaaagctggaggctgttataatagtccaggtaagtaaagaggtggtaggaaatgtgataaaatggtataaaactacacacacacattgaaccaatgtgaatttcctggttttgatactgtgctataattacataggatgcaaccactgggggaagctgggtgaagggcctcgctatactatctttgcaatttcctatgaatctataagaatttcaaaattaaaagtttttataaagtgggggagggggtgatagggatggagaggagaagagtcagcaggacttagtgactggcttgatacaaggggttgggatatgactcccaggttttggtcttgggtgacatgatgaatggggggaggagcactaactgaacagtggaaggagcaggccagtttaggcatgagataaagaccaactggggttgggggatgtctttagccaatcttcaggccacaaaatcccttattacctggactgccagggagtaataacaccatcatcagggcccccaatcagcaccaggtggcccacacgcagaaagttcttccgccatactgtaggatgggaagaagagaggctgagtcagccacaggggtcaggccaggttggagagggagacatagggagtcaaagaagcagaaaaagcaacacaggtaggagcctgaattctcacctgtggcattgggatggtctctttccccattgatcagggccaggaagctgctggcattgaggtacaagtcatcgtggtggggatctgggtacaaacagcagttagaaaaagaagcagaaaagggaggcaagactggtggtgaaaagcccaataaggaagctgcagcaatagtcaaggtggatagtaataaaatagtagtgataatgtaggccaggtgcggtggctcacacctgtaatcccagcactttgggaggtagaggcaggtggatcacttgaagtcgggagtttgagaccagcctggctaacatggcgaaaccctgtctctactaaaaatacaaaagttagccaggcgtggtggtgcatgcctgtaatcccagttactcggggcgctggaatcacttgaacccaggaggtggaggttacagtgagccgagactgcaccactgcactccatcctgggagacacagtgagactccatctcaaaataataatagtagtgataacaaccgtaaacatagtaacaagtacttttttttttttagatgaaatctcactccgtcacccaggctgaagtgcagtggcaggatctccgctcactgcaacatctgcctcccgggttcaagcaattctcctgactcagcatcctgagtagctgggattacaagcgtgtgcccacattcagctaaattttttttgtatttttagtagagatggggtttcaccatgttggccaggctggtctcgaacccgacctcaggtgatgcgcccacctccccctgccaagatattgggattacaggtgtgagccaccacacctggcaatagcaagtacttctatctagtatctactatatgagccaggtactattcaaagtacattgcattcatttatttatttaatccttacaaccacctggtgaagtacatgctataatattttacagataaggaaaactgagtaacagaatggttaagtaacttgcccaaaggcacccaatagggtcaagattcaaacccaagtattctggccccatggtctggtctagaggttggcaaactgtgaccaaaggaccaaatccagcctgctacttgtttttgtaaatgaagttttactggaacacaggcacattcattcacatatggtacatggctgctttcacactacaacagcagaattgaggagttgtgaaacagactatatgtcctacaaagtcaaaaatatttactctctggccctttatagacaaggtttgctgactcccacatcagactaaaccttctaaggcaataaggtgacacacttaaaacattctgggccaggtgcaatggttcacacctgtaatcccagcactttgggaggccgaggcgagtggatcacctgaggtcaggagttcgagaccagcctggccaacatggcgaaactccatctctacttaaaatacaaaacttagccgggcatgatggcgcctgcctgtaatcccagctactagggggactgaggcaggaggatcacttgaacctgggaggcggaggttgcagtgagccgagatggtgcactgcactccagcctgggcaacagaacaagactccgtctcaaaaaaaaaaaaaattctgaacagagcctgttcaaataactcaataaatgtaagttatctttattgtcatcactgctattggttgtagcagaggtggaagcaactgacctgatccatggaagccccagttcagcatccccactcaccatgccagtagttgcagatggagaattcctggccccaggggctatagcagatccgatagaggttagaccgcatggaggtggggaacagccacttcaagtagtccgtgtctggcaagcgaatggcaatgctaagtgaccataaacctctgttcccccaaaactcagggcattctatggagtctagtgcccactcacctccatactgtcccatctgtggagaggagagggagatgaaagaatccacgttgtgatcatccatgacagaaagcagagcccggcacacaaggccccctgtaagcagaacaccacattgggcaggcacttaaggacagcaaagccagcagcaccccccacccccaccacacacacacacacagagacacacacagacatacactgtacacaaaggagactgaggcttacagaaggcaggcacaccctgtgccaaaaggtcacacatcatataagtgactgagcccgaattagatgctgggcctcctgcctctagttctaggatgtttttacctgccccattagcccttatgtccaagaaccatgggtaacaggaagcaaaagggcagcagtgtagggagcctccctcccattcaagacagagatgagacccaggtgctgagggaagtcagaaaggaagggctcaggtaccagggttgtgcctggagcaatgtggttcagaaaaagggacgctaggaagtgtccctcagataaggatcaagcctcagatagggcttaggagttaggggcaggggagtcgcctaccctgcgagtagcagatgagatgcaccccttgaggggcctttgccatgatggggaccacagcctctcggaacccttgcacctgttcccacaggggtcgcaagctctctctcccatcgaagagatcgagcactgtcaccacagtcccggggtgtgtctgtgggaagggggcaatgcagccaccggggataggctaagaagctcccacacgccaccccctggcccgcgtccacaggtctattgtaccctgctagaaccagggatcccgtcccccaactctcccccacgccagcaccagctccctgaggaactgggcaggcccagaggggtggctttcagttccccgctctccctcccctgccacagtagacgcctctaacgccctgcacccaggtgtcccctgccagacctcattgatgtattccagcaggtggcggaagctgtacgagctgtcgaagagcccatgcaccacgatgaccggcttgtaggacgcgcggtggggcgcgggggctgcaagcagcagcagcggcaggaaaggcaacagaagcaggacccacgccgcggggagccgctgcccccagagccccagcatgctcccgcctgagaaaggggtgataagggcatgtgagggagatggcaacaccctcctccctcggaacagacgcccggcaatcaagccacctcctctcgctcccacaccaggtccgtgtcacaaaatagcctacttttaacttactccagccctctccctacaaacacacccccccaccacgttgacgcaccaacgcgcacccgaagtcccgcctccaactcagcgttcgggggacttgttctctaggtccaggatcttcctaatgcatcgcctcagccatgaacaacgcggagttctttaatacccgtgagcagcagcccaggccccttgaagagtgcagactcccacctggcctgggtccgtaggcctcgctccacccgctgtttacttatcccaagtctggaacccacggtggcggggggaagggtgaggaaagagaacgcaggggaatgacggatgggagggggaagggcgggctgcttggggtcgcgcaaatccgtcacgtccggggctttctctggcaaccgcgcgagcgttccccgcaacacagacccaggacaggaggggcaatggaatattccattgcgccctaggtgctggggaggaaacaggcggagcgatccatttaggccagtggggagaggaaaaagcagcaaacatattctgggaatggaaagaaggcctctccaggcttcgttgcccccagcgacccgaaagtccgatttccccgccttgattctccccacttcccaatacaggcgtctggctccgcagcagaacacgaagtttgcattccccaaggggcggccagggggcggaccagggaaaggtagtcctctgcattttgccgtgtgctgggtgagtggcagggtggcctggagggctgatgccagcccgggcgtgcccctcaacacccaccccaccccaccctccagtccgccccaggtcagcgacttacaactcttcattctgaagtgcgtgtagtgcccttgtctccagagacgcagagagtcctcgaggccccttgagctaagtgcagcctggcccagtttctcctgccctactctactcccctccctataagcgacccaccctcaaggggcggagggcgcgtagggatgcgctgactcatgcccgcgtaatttcgaccagtctttcaacctgaacgacccccagaatctggctgtctgagttatctgtgggtggctccctaccgaaacccccaggcgccccacctctccgcctgtgacccctaaccgacaccctagtgcctcagggcttttacttgctagggcttttacttagcatttaaagacgtttctctagagataaggatttctcagcatgtctgagcccctctctctgtttacaaggtcattgcttggtctaaatttgtctcaatcaaaacatttttgcgctcagaatggtgtagagtgacgatgaggtggcggtaaggggttgagcgctcacgcgaacgcctaagtgaccagaacgactggtgtgaagccgtgatctgactctgtggagcctgggactggtttcagcgagagcctctgtactgctctgtagtctctgctaggacatggacgaaaagggacgcagccgggagagcgactgccccaggtgggggctggggggacgtaagggaagaataatgattatctggctgtgtttttgtttaaaaaaaaaaaaaaactggtgtaaatctccatagacttcctatcctcgctcccttcacccacccacgcgctcccaagatgcaataagcaaataaaaagactaataacgctgtactgcaggtcgactcaggagctggagatgcgtcttggtgggaggtggtgggtgggagtaggggggtttagggaatggatctgaacattgaccagcccagagactctaagcagcctcaaaagcaaagggaaagtgggggaacaagcacacattaccaacagagctgccagaaatgagcagttaagtcataccccctaccccctccaaaagagcttcagctccttagtcctggacgaagaaggtatgtatgcacaccgcccaaactctctctcccttttccctccaaggcccagctccccctgatttacagacctgggcctccctctttactgctaggttggtaggttcaccaaaccctgggaacttttcagaccatcgcagttctgaactctgcacaattctctctcacacacaagtatttatctcttctaaagaggaggaaactggggccaaggatttgggagaagaccctggcaccttgcagggagctaagagggggagacgacctgcctctggaggcacctgggttattaactccactgagaacctgttcacttcctcccacaatacaatcactgagtcttggtgggggagactccagagagttctccttccttcctttccttagtcccacccgcctcgcctggtctagcctccgtgtttccatgacaactccaaaggagcccaaactgggggcttgaatgccggggtaagaggaggagagaggtggtccgagagcagagagagaccgagtgggaaacatctgaagcgctccccctccctcgcctcggtccctttaagctccccccctccccgctctccctccgcccgccccccccgccccccccccccgccgctgccttcatctctccatctctgcgctgctgccgctgcgccatccagcacccagactccagcaccggccgaggacccccactccggctgcagggaccctgtcccagcgagaccgcaggcatgtcatccgaaaagtcaggtaaaaacaataacaaaacctcccaccccctccactgtctccagactctccgtcccccttgccccaaccccctcccttacccctcctcagctgtggttctatttcattccccttctctccagctctcaacactcccccagtccccctcctctttctgtctccccctttctcttcctttcctctttccagtggcagcctctgccccttgccaacaacatggtcaggggggtaggttgagagggtgaaggaggtacagccaggttttgcagggatggcatcattgggagtgacagatggacaatcactggctggcatggagacatcctgtgaggaaatatggagacatgaccagatgggggttgtcaagggagcaaaatccagagggctcttcttaatctgccctaaaagaggtcccgagattctcacagaggctggggcactcctccccccactgaaggaacagcagagtggaacacatgtcatcccacatgtgtttatacaactgttgaattgagcacatattaacacagggttgcatgtctacgcatacgcacacacaggactagctcggataggccagcccaaaggcagctatagcaaaggagaggggattaggtctgcaggtgagagctgggtgcatggtgatgaaaaagacagaaaagaagcagaccagagttgtgacctcaaaactagattggaaggaagaaggaggggggcagatggcctagatacagcccctctcttgcccctcaaattagagatggtttctcacccgtctctctctatgtgtctctcccattatctttctccatccctgaccggctgtgtttccccttaccccctcctcaactcatcactgtgtcatctttcctcttatactctcctccactcacctcccccaggactcccagactcagtccctcacacttctccgccgccctacaatgcccctcagcctccagccgaacccccagccccaccgccacaggcagccccttcctcacaccatcaccaccaccaccactaccatcagtctggcaccgccaccctcccgcgcttaggggcagggggcctggcctcttccgcggccaccgctcagcgcggtccctcctcctctgccacgctgccgaggcccccccaccacgcccctcccggccctgctgccggggcacccccacccggctgcgctaccttgccccgcatgccacccgacccttacctgcaggagactcgcttcgagggcccacttcccccgccgccgcccgctgccgccgccccgcccccgccggcgccagcccagactgcccaggcccctggcttcgtggtgcccacgcacgcggggactgtgggcacgctgccgctggggggctacgtagcgcccggataccccctgcagctgcagccttgcactgcttacgtgccggtctacccggtgggcacggtgagtgccgggcagacagggacatgggaaagagggggacgcgatacaggacttgaaattggggatacgctgggggctggtaggatagaggaacaagggcagggaacaggtagtgttcccgggacaagccctagaaagaagggagcctgagacaggaaggactagggagagacacgggagtaggagtctactggtgcccagagtcagggcctgggagggggatcggagcctagaggttcagaggaggtctgaaagtaggaaaccgcctggcgggggacggggggaatggaagctgggaaccaagagggatgtgggagaagcctgggactaagggggtaggggaggcctggtaggtgtctggagggaagaaagaaggtctgacctgaggccaggacagccccagtgggaccataccttgcgggagagaatgtagaaagcccaagaatatggtggttaatgaagcaaggaagggaggagaggggcttaggtggaatttatgggtgtcctggaagggtaatgggtgctttattttgagaagccataggtaaaaattgtgcttttaaagccactctgccagccgcccaacgctggtaggctgggagagggtcagagtgatgcccctgccccccaaatttccttccacagccatatgcaggcgggaccccggggggaacaggagtgacctccactctccccccgccgccccagggcccagggctggccctactggagccgaggcgcccgccacacgactacatgcccatcgcggtgctgaccaccatctgttgcttctggcctactggcatcattgccatcttcaaggccgtgcaggtagggggcaggggcatactcggtttgggggcggggacagggagttctgggcgttctggggaccatcttagagaaaggctgaggcgttcgaacgaggccgcagctctttgacctccttcccccacccctcctccgtaggtgcgcacggccttggcccgcggagacatggtgtcggccgagatcgcttcacgcgaggcccggaacttctccttcatctccctggccgtgggcatcgcggccatggtgctctgtaccatcctcaccgtagtcatcatcatcgccgcgcagcaccacgagaactactgggatccctaaaaacgcccctggtccggccccactctgcgcccctcgatctcccaggctctttctgcagtcataccgcggacccaatgggcgccctgcacacccgtttctggggccgtcagacttggatacatcgtaaactccgcctccacggaacgtctcgccttgcgagcaagctcggaatccagttcctcaggaacccctccaaaacccacacccccagggacgccgctttccgggatcccggccaaacgccggaccctcagtcgctccaggccccctcaccctcaaagtgtagcgcccccaaccgagcaacctcggtttggtccctaaaaccccgcctcctctataagcaccgccccagctctgacaaaaccccgcctccaggtcggcaggctccgccttcttttcttctccgcggggtgattcagtccagtgattgggtttgtggctccaggcctcgcccacagacggacagacccctccctttcttccggcaaaaggaccgagccctggggtagtaaggcccccacactcctgttttttgcaagtacatttttgtccctcctccacccaggtatctgcctattttcttgctaatcccagaacctttccttttgctttttttaaggacatttgggaagttcctggtgtaggacccttctccctgggataagaaacctgcctgtaaacgctctgtaaatactcccttccacccatcccagcccctgggcagccgggcagaagggaatccaggctatggacctcccaagtccccgctccccgctcccctcggcggccccgccttgttctgatctgtgtgtgagtgtgtgtgaacttctgaaagacaatattaaagagacttagttgatttatcgcccgcaattccaaagactgcggccccgcaaagaccctccccacttttgattccgcctttcacttcccttcatctcctcttccaaggaaaaaaaaagaaaacccgacagagactaacgtgagggacacagattcccagatcgccagagagacacgtgaatatgggggacggaggggagctccctgggaatccaccaaggaagaccttggggtccattctcagtgaggctttattttcttagtgaggctttatttccccagtaccccttttccattccctactatccccagaactccaggaagacaagagaacagagagggcagaccatggtgaagaagctggtcaaggatagagtgatgggggccaagaagagatgccagctgcccatagctgttcctgactgtgggctggagggtggcagataacttggattagagccccacatgctggactgtagggggtataggaaaggcaaagagagcagattgctgtgggagcccagggaggaggtcaatggcctctcaagtctccctgggactagttgccctctcctatcctgaggtcaaccaataggcctcttttctgaggggagtggtgattaggggatgctgccagcagtgggcttgggtctttggttgtacacccacaggacagggtcctaacctaatttatgcatttatgcaacatgcagactccatgctggatgctggtgagacatccacccagacagcaggtgtgacccctgacctcatggagcttacaatctagaagggaagccatgcactgagataggaaatgtgataggagatgtgggaggagggtggggtgaggtgtgaatatcatgggttcgcccttggatgtttcgcatttaatgtgcctaccttaccaaacttcttgaaaaacagaattcacggctgggcacggtggctaacacctgtaattccagcactttgggaggccaaggcaggcggatcacttgaggtcaggagttcgggaccagcctggccaacatggtgaaaccccatctgtactaaaaataataaattagccgggcatggtgacgggcacctgcagtcccagctacttggaaggctgaggcaggagaatcgcttgaacttgggaggcggaggttgcagtgagccaagatcaagtcattgcactccagcctgggcaacaagagcgaaactccatctcaaaaaaaaaggggcaggggggtgcggaatattgctatcagagatatgtctgtatctgtctttttttcatacccactatttcttgacttattggaatatgcatccacaccctattctcctgaaacctccctctcaaatggcaaccaattacccagatcccaaatcaatggcattttcacagtattctgcctctctaagccctcccatgtttgtcccttgaccctgaattccccacatacccaggttcaagaacgtattacctcccttcccccgacacacacacagacctctaaccattccgcctctgccttccctccttgctttttctcctcccttcccctaagtgtccatctctgattttttttccttctctgagactttcctttgaaaagctcattcactcaactcagctaatcaaatgcttttccaacctgtattttacatgcagacgttttttccagtgcctgaagatcatagccacatggaagatgcttgctggtcctctaaaatcaacacattccaaaacaaactgatgaaatgccacagaaaacctgcttccctgtctctgttaatagaccattttcccaatcactcttccttatctagaaatttgccgcctcctccctctccctcctgccttatttttggtgtgctctcaagcctagtcagttctgccaccacaatgtcttttgaatctgtaatttttccccagcccttgctggaaaaattacctcattaggattattgcatcagctttcccaacaggtctccctacttcctacttctccctacctcaagtctccctccacactattgtcagatcagcctccctaaacacactttcataactccactgctcaaaagcccttcaaggttccctattgcctactcaattatttacaaaattttaatctggcctttaacaccttccataatttaaaatcatccagcttctctgttcattctaatttctaaccatactgaattactcatcattcccacctccaggtatttgcccagctgttcccaaatcttagacctccttcccaaatctctgcctattataaaccaaattgtttgcagcttgtcacaaatttcagaggctttagaccacatctaggctcttgctcatgatgttctccccctcttgacatctgcctctctacttggtcaaattttatttacaatatctttcaaagtccggatcaattcatccctcactgtagcaaaaaggtgtctctctttcctctgggttagattaaagcagtgggtttccaaacagagcttcaggcattccttggagcaacggttcttaccccaggttacacattagaatccactggggagcactgaaaaatctgaaagcccatgtcgcatcctaaaacaattaaatcagaatctctgggctcagtgccagtggctcacacctgtaatctcagcactctgggaagtcgaggcaggaggatcgtttaagcccaggagttcgagactagcctgggcaatatggtgagaccccatctctacaagaaagtttaaaaactagcctaggccagatcgagaccatcctggctaacatggtgaaaccgcgtctctactaaaaatacaaaaaaattagctgggtgtggtggtaggtgcctgtagtcccagctactcaggaggctgaggcaggagaacggcatgaacccgggaggtggagcttgcagtgagccgagatcgtgccatgcactccagcctgggcaacagagcgagactccgtctcaaaaaaaaaaaaaaaaaaaaaattagcctaggccgagcgcggtggctcacacatataatctcagcactttgggaggccgaggtgggtggatcacctgaggtcaggcgttcaagaccagcctggccaacgtggtgaaaccccgtctccactaaaactgcaaaaatcagccgggtatggtggcacatgcctgtaatcccagctactcaggaggctgaggcagaagaatcgcttgaacctaggaggcggaggttgcagtgagcccagattgcaccactgcactccagcctgggtggcagagaggcactcagtctcaaaaagaaaaagaaaaaaaaaatttagccgagccccatggctcacctgtagtcttagctacttgggagggtgagacgggaggattgcttgggcctgaggggcagaggcttcagtgatcagaacacggtgctccagcctgggcaacagagtgagaccctatctcaaaacaaacaaaaaagaatctctgggggtggaactctggcatcagtatttaagacataaccaggtgattccaaagggcagccaaggttgggaatcacaggtttacagacactttaaggaccacccagggagaatggaaaggccaaaaaatgacttcaacccgggcaattttctttaggagaaaagtatctagatctaagattcatgttatctgcatattttctcatctcttcccacctgatatcttgacatacacagtttaccttgtgagctacttgaaggcaagagtcaaatctggcttatctctgtttttcagatcctcatcagataaaacctcctctaccaatctttgaactcaattgaattgaaaggaatcaggcaaagggagagatgaataaaaaatgacttagctttcttttgcttttccttaggaatgtttgtttcttaatctcagatctcttaacctcacccagactcctccctcatgaggaaataaaatgttacaatgtgtggccgggcgcggtggctcactcctgtaatcctagcactttgggaggccgagatgggcggatcacgaggtcaggagatcaggaccatcctggctaacacggtgaaaccccatttccactaaaaatacaaaaaattagctgggtgtggtggcaggcacctgtagtcccagccacttgggaggctgaggcaagagaatggtgtgaatcccggaggcagagcttgcagtgagccgagattgtgccactgcactccagcctgggcaacagggcgagactccgtctcaaaaaaaaaaaaagttacaatgtgatcctcttcctatctgactcacctccctctgcaggtgatacccttggctgtggcacctctactgacagagactccatcctctaggagaggctctgccctcccataacatctgtatgggtgctctcatacagatgggggaaaaccatgattagattctgggtcatcattccccctctacaatggaagattcagcacctgatcactctacttccaccgctcatttcattttcttctttttattatttatttatttatttttgagatggagttttgctcttctcgcccaggctggagtgcagtggcgcaatctcgtctcactgcaacctccgcctcctgagttcaatagattctcctgcctcagccttagtaggtgtgattacaggcatctgccaccacgcccagctaatttttgtatttttactagagacagggtttcaccatgttggccaggctggtcttgaactcctgatcttaggttatctgcctacctcggcctcccaaagtgctgggattacacacgtgagccaccgagcccagcctctttttcttttttcttttttttctgaggcagggtctcgctctgtcacccaggctggagtgcagcagcaggatcatagctcactgagcttcgatctcccggtctcaagtgatcctcccagctaattttttttatttttattttattttttttttttgagatggagtctggctctgtcgcccagactggagtgcagtggcacaatctcagctcactgcaaccttgcctcctggattcaagcaattctctgcctcagcctctgagtagctaggattacaggcgcctgccaccacgcccggataaattttgggtttttttttttttttttttgagacagagtctcaccctgtcgcctagcctggagtgcagtggtgcgatctcggctcactgcaagctctgcctcccgggttcatgccattctcccgcctcccacctcagcctcccaagtagctgggactacaggcacccgccaccatgcccagttaattttgtttttgtatttttagtagagacggggtttcaccgtgttagccaggatggtctcaatctcctgacctggtgatccgccctcctcaccctcccaaagtgctaggattacaggcttgaggcaccgcccctggcctgtttttttgttcgtttgtttttgttttttttggacggaattttgctcttgttgcccaagctggagtgcaatggtgccatctcagctcactgcaacctctgcctcccaggttcaagcgattctcctgcctcagcctcctgagtagctcggattaccggcgtgtgccaccatgcccggctaattttttgtatttttagtagaaatggggtttcaccatattggtcaggctggtctcaaactcttgacctcgtgatccacccgcctcggccttccaaagtgctgggattacaggcataaaccactgcgcctggcctctggcctttgatatttaatagagatgaggtcacactgtgttgcccaggacagtctcgaactcctgaattcacacaatctgcctgcctcagcctcccaaagtgccgggattataggcatgagctacagtgcctggccccgttttattatttttgttttcaatgttcatgcagattctctagcaccctgcccttctcttgcagtgatttatttctccctgcttccctctcgccctatgtcataccttcaacttggttgccaccaatacctactgcccttctaaaatctcatcctcagtcttttcatgttgctccccagtacccctatcccaaaaattcttcaaccccatctgggcctcccatccactaacttacttttcattgtttgatctcaattcttcactttcctcattacccagtttagattccaaggttcaacacggtaatcgcctctcagccctcaccctgtactcctggccccccttcctctggcacattttatccctggtcaaatcccactctgcctgctccacacctgcattcaacagctggggagaaacacacagtcatactgactggtcttgcttcctgcgggccctcagtgtggcatgccagctcgcctttccctactcagttcacattccccaaatctgagaccacaacttcacaagatgatgacttttcttcctatttcagtgagaaaacagaaactttcagaagggaacttcctcatgttcccaccccaaattcaccagtctacctgcaactctaccgcagagaagctgacatgcacccacctgccacctcatctgtaccccgggatcctgttccctctcacctgctcagagatgttattcctgaaattatcccctatctctctctctctcacttaatcagtttacccctctgtactgcaacactcccatcattatgcaaacatgctataaaattatacttcatctctgaaaagaaagaaaaaaactgtttcgctactcacctaggtagtaaaagcacaacattcagagaatggtgcttaccctttggcagaaaagcaatctggaaagggaaattcagggagccttaactatactggggaagattttacctcttgtttttgctttcttttttttttttttttttttttgagatggagtctccctctgtcacccaggctggagtgcaatggcacgatctcagctcactgcaacctccgcctcccgggttcaagcgattctcctgcctcagcctcccaagtagctgggattataggcacgcaccaccacacctggctaatgttttagtagagacaggatttcaccatgttagccaggctggtctccaactcctgacctcaggtgatccgcccacctcagcctcccaaagtgctgggattacaggtgtgagccaccttgccctgatgggaagattttacttcataagctgcctgatgttcacaaaattattctttgtaatacatatatatttatgcatataaattataattttatatgtataaaataatgcatttatttttaaatttaaaaactcttccctgacccagctcactccctcagtgttccacttctctctccacttaacaaaacttctcactgcctctactttctcacctctcattcactcttgaatttctctcaatcaggctctcatccccaccactttacttaaaccacatgtcagagtcacaaatgacctccaagtttctaaacccaatggtcaagggtcagtttgtggcaggccaattctccctgacagtcacacagacaggcctgcatagcaccccagttacacagacagatttccacagcattgccttaacattgagcaaatagttaaacctaggggaattggtgtacagacatcaaagctagaaatgaaacacatggtgagtaagagccttgcatgggcttctcccttgctggagcaagtcaaaataacagagacagccttacattcctagtgccaggactcgtctcgggtcgacgatatctgagacaagtcaaggtaacagaggcagctgtttgaatagattcactggacaatctaaggcagctctccgcaccaagctgtaaaggagataagatagaaataatcactctggtaccacagtaaacaggccttgaaggtactggggccctcacagcttaatcagacttagcaagaatttttttgcctctgaccctctagttgaaacaaaattagttactgatagactttggtgaatgccatactgcatgtaggcatataacctaaacctgtataaacactaagaaaatagtaacactggccgggtgtggtggctcacacctgtaattctagcactttgggaggccgaggtgggtggatc

SEQ ID NO: 130 - DNA, 882 bp, Homo sapiens
cggccaggcttgcgcgtggttcccctcccggtgggcggattcctgggcaagatgaagtgggtgtgggcgctcttgctgttggcggcgtgggcagcggccgagcgcgactgccgagtgagcagcttccgagtcaaggagaacttcgacaaggctcgcttctctgggacctggtacgccatggccaagaaggaccccgagggcctctttctgcaggacaacatcgtcgcggagttctcggtggacgagaccggccagatgagcgccacagccaagggccgagtccgtcttttgaataactgggacgtgtgcgcagacatggtgggcaccttcacagacaccgaggaccctgccaagttcaagatgaagtactggggcgtagcctcctttctgcagaaaggaaatgatgaccactggatcgtcgacacagactacgacacgtatgccgtacagtactcctgccgcctcctgaacctcgatggcacctgtgctgacagctactccttcgtgttttcccgggaccccaacggcctgcccccagaagcgcagaagattgtaaggcagcggcaggaggagctgtgcctggccaggcagtacaggctgatcgtccacaacggttactgcgatggcagatcagaaagaaaccttttgtagcaatatcaagaatctagtttcatctgagaacttctgattagctctcagtcttcagctctatttatcttaggagtttaatttgcccttctctccccatcttccctcagttcccataaaaccttcattacacataaagatacacgtgggggtcagtgaatctgcttgcctttcctgaaagtttctggggcttaagattccagactctgattcattaaactatagtcacccgtg

SEQ ID NO: 131 - DNA, 1558 bp, Homo sapiens
cctctgggaaagggcagcaggagccaggtgtggcagtgacagggaggtgtgaatgaggcaggatgaactggacaggtttgtacaccttgctcagtggcgtgaaccggcattctactgccattggccgagtatggctctcggtcatcttcatcttcagaatcatggtgctggtggtggctgcagagagtgtgtggggtgatgagaaatcttccttcatctgcaacacactccagcctggctgcaacagcgtttgctatgaccaattcttccccatctcccatgtgcggctgtggtccctgcagctcatcctagtttccaccccagctctcctcgtggccatgcacgtggctcaccagcaacacatagagaagaaaatgctacggcttgagggccatggggaccccctacacctggaggaggtgaagaggcacaaggtccacatctcagggacactgtggtggacctatgtcatcagcgtggtgttccggctgttgtttgaggccgtcttcatgtatgtcttttatctgctctaccctggctatgccatggtgcggctggtcaagtgcgacgtctacccctgccccaacacagtggactgcttcgtgtcccgccccaccgagaaaaccgtcttcaccgtcttcatgctagctgcctctggcatctgcatcatcctcaatgtggccgaggtggtgtacctcatcatccgggcctgtgcccgccgagcccagcgccgctccaatccaccttcccgcaagggctcgggcttcggccaccgcctctcacctgaatacaagcagaatgagatcaacaagctgctgagtgagcaggatggctccctgaaagacatactgcgccgcagccctggcaccggggctgggctggctgaaaagagcgaccgctgctcggcctgctgatgccacataccaggcaacctgccatccatccccgaccctgccctgggcgaagccctcctccttctcccctgccggtgcacaggcctctgcctgctggggattactcgatcaaaaccttccttccctggctacttcccttcctcccggggccttccttttaggtgctggagctggaggggtggggagctagaggccacctatgccagtgctcaaggttactgggagtgtgggctgcccttgttgcctgcacccttccctcttccctctccctctctctgggaccactgggtacaagagatgggatgctccgacagcgtctccaattatgaaactaatcttaaccctgtgctgtcagataccctggttttctggagtcacagtcagtgaggaggatgtggtaagaggaggcagagggcaggggtgctgtggacatgtgggtggagaagggagggtggccagcactagtaaaggaggaatagtgcttgctggccacaaggaaaaggaggaggtgtctggggtgagggagttagggagagagaagcaggcagataagttggagcaggggtggtcaaggccacctctgcctctagtccccaaggcctctctctgcctgaaatgttacacattaaacaggattttacagt

SEQ ID NO: 132 - DNA, 1642 bp, Homo sapiens
cggactggtggctggtctgcagggttgacctgcgcaatgcagaggctgcaggtagtgctgggccacctgaggggtccggccgattccggctggatgccgcaggccgcgccttgcctgagcggtgccccgcaggcctcggccgcggacgtggtggtggtgcacgggcggcgcacggccatctgccgggcgggccgcggcggcttcaaggacaccacccccgacgagcttctctcggcagtcatgaccgcggttctcaaggacgtgaatctgaggccggaacagctgggggacatctgtgtcggaaatgtgctgcagcctggggccggggcaatcatggcccgaatcgcccagtttctgagtgacatcccggagactgtgcctttgtccactgtcaatagacagtgttcgtcggggctacaggcagtggccagcatagcaggtggcatcagaaatgggtcttatgacattggcatggcctgtggggtggagtccatgtccctggctgacagagggaaccctggaaatattacttcgcgcttgatggagaaggagaaggccagagattgcctgattcctatggggataacctctgagaatgtggctgagcggtttggcatttcacgggagaagcaggatacctttgccctggcttcccagcagaaggcagcaagagcccagagcaagggctgtttccaagctgagattgtgcctgtgaccaccacggtccatgatgacaagggcaccaagaggagcatcactgtgacccaggatgagggtatccgccccagcaccaccatggagggcctggccaaactgaagcctgccttcaagaaagatggttctaccacagctggaaactctagccaggtgagtgatggggcagctgccatcctgctggcccggaggtccaaggcagaagagttgggccttcccatccttggggtcctgaggtcttatgcagtggttggggtcccacctgacatcatgggcattggacctgcctatgccatcccagtagctttgcaaaaagcagggctgacagtgagtgacgtggacatcttcgagatcaatgaggcctttgcaagccaggctgcctactgtgtggagaagctacgactcccccctgagaaggtgaaccccctggggggtgcagtggccttagggcacccactgggctgcactggggcacgacaggtcatcacgctgctcaatgagctgaagcgccgtgggaagagggcatacggagtggtgtccatgtgcatcgggactggaatgggagccgctgccgtctttgaataccctgggaactgagtgaggtcccaggctggaggcgctacgcagacagtcctgctgctctagcagcaaggcagtaacaccacaaaagcaaaaccacatgggaaaactcagcactggtggtggtggcagtggacagatcaaggcacttcaactcatttggaaaatgtgaacactgatgacatggtataggagtgggtggggtgttgagccacccatcagaccctctttagctgtgcaagataaaagcagcctgggtcacccaggccacaaggccatggttaattcttaaggcaaggcaaatccatggatgagaagtgcaatgggcatagtaaaagtgcatgaattt

SEQ ID NO: 133 - DNA, 3658 bp, Homo sapiens
tgaggactcttagaagtgctcttatcagtagcatcttaattactttacaatggattttaaatggaaaggaagtttacaataatagcaaatgcatattgacagctctttagtgcccggtgctgttctaagtccttatgactaccctgtgaaataagttccaccatgaccccaattttcctgaaaaggagactgaggcatggagagctttagtattttgcccaatgtcacacagctagtaaatggggacccccatgtgaaactactcactgattgtcctactctcttgtggttttatctttttagcagacaccaaatgaggaatgtttgttcctggaaaggctggaggagaaccattacaacacctatatatccaagaagcatgcagagaagaattggtttgttggcctcaagaagaatgggagctgcaaacgcggtcctcggactcactatggccagaaagcaatcttgtttctccccctgccagtctcttctgattaaagagatctgttctgggtgttgaccactccagagaagtttcgaggggtcctcacctggttgacccaaaaatgttcccttgaccattggctgcgctaacccccagcccacagagcctgaatttgtaagcaacttgcttctaaatgcccagttcacttctttgcagagccttttacccctgcacagtttagaacagagggaccaaattgcttctaggagtcaactggctggccagtctgggtctgggtttggatctccaattgcctcttgcaggctgagtccctcaatgcaaaagtggggctaaatgaagtgtgttaaggggtcagctaagtgggacattagtaactgcacactatttccctctactgagtaaaccctatctgtgattcccccaaacatctggcatggctcccttttgtccttcctgtgccctgcaaatattagcaaagaagcttcatgccaggttaggaaggcagcattccatgaccagaaacagggacaaagaaatccccccttcagaacagaggcatttaaaatggaaaagagagattggattttggtgggtaacttagaaggatggcatctccatgtagaataaatgaagaaagggaggcccagccgcaggaaggcagaataaatccttgggagtcattaccacgccttgaccttcccaaggttactcagcagcagagagccctgggtgacttcaggtggagagcactagaagtggtttcctgataacaagcaaggatatcagagctgggaaattcatgtgcatctggggactgagtgtgggagtgcagagaaagaaagggaaactggctgaggggataccataaaaagaggatgatttcagaaggagaaggaaaaagaaagtaatgccacacattgtgcttggcccctggtaagcagaggctttggggtcctagcccagtgcttctccaacactgaagtgcttgcagatcatctggggacctggtttgaatggagattctgattcagtgggttgggggcagagtttctgcagttccatcaggtcccccccaggtgcaggtgctgacaatactgctgccttacccgccatacattaaggagcagggtcctggtcctaaagagttattcaaatgaaggtggttcgacgccccgaacctcacctgacctcaactaacccttaaaaatgcacacctcatgagtctacctgagcattcaggcagcactgacaatagttatgcctgtactaaggagcatgattttaagatgctttggcccaatgcctataaaatgcccatttcgaagatatacaaaaacatacttcaaaaatgttaaacccttaccaacagcttttcccaggagaccgtttgtattaccattacttgtataaatacacttcctgcttaaacttgacccaggtggctagcaaattagaaacaccattcatctctaacatatgatactgatgccatgtaaaggcctttaataagtcattgaaatttactgtgagactgtatcttttaattgcatttaaaaatatatagcttgaaagcagttaaactgattagtattcaggcactgagaatgatagtaataggatacaatgtataagctactcacttatctgatacttatttacctataaaatgagatttttgttttccactgtgctattacaaattttcttttgaaagtaggaactcttaagcaatggtaattgtgaataaaaattgatgagagtgttagctcctgtttcatatgaaattgaagtaattgttaactaaaaacaattccttagtaactgaactgtcatatttagaatggaaggaaaatgacagtttgtgaaagttcaaagcaatagtgcaattgaagaattgacctaagtaagctgacattatggttaataatagtattttagatttgtgcagcaaaataatttcataacttttttgtttttgttacttggataagatcaatctgttttattttagtaaatctttgcaggcaagttagagaaaatgcagtgtggcttaacgtctctttagtatgaagatttggccagaaaaagatacccagagaggaaatctaagataattataatggtccatactttttattgtatgaatcaaactcaagcataacattggccaaggaaaattaaataccattgctaacttgtgaaatggaagtctgtgatttcggagatgcaaagcattgtagtaaaaacaccaatgtgacctcgaccatctcagcccagatatcattcatatatctgttcaatgactattaaggtgcctactgtgtgctaggcactgtactggatactggggaccttgtctgtctggtttgctgctgtatcttctcccagggcattatatttatgatgaaagatgctgtggattcaattctttcagtcaagaataaacacagactttgtaggttcctgctgaataaagcaaatcccagaaacccagattttggaagaatcagcaacccccagcataaaataaacccctatcaaaatgtcagaggacatggcaaggtaaacttagcattttcaactttagaaccgggtcagcttcagggggactgctttcaaatcagccaaagagcctgtcagatcttcttagaaggaagaggttggtagttccctgctctgttttgaacatgctctagtttattaacctggggacattcccattgctgtcttaagtaagtctcatagccagctcctgtcacgtgactctcatatggattcattttcgggccagctctgaacaaagcatcatgaacatatgtgcttttggtcgtttgcaatgtgatggtggtggaggtaggtattggtttccttggaaggcatgataagaaagattcacaatggccaacagtgtgtatgaacaaaaaactgattggagcatcagctagtactgaaggtccttgctttgtgtcagaggcaaaggaacccaaggcgccaagtcctcagccttgagtgtactgctgacaactaaactcacaggctgcaaagcagacctctgatgaagatgcctgttatttcacatcactgtctttttgtgtatcatagtctgcaccttacaaatattaataaatgttccaataataggtgataatgtctctgagtttctgagcatcctgctgcctcatctttctatca

SEQ ID NO: 134 - DNA, 1195 bp, Homo sapiens
cctggggacaatgtgggcttcaatgtcaagaatgttgcctgtcctgctgtctctgctgctgcttctgggtcctgctgtcccccaggagaaccaagatggtcgttactctctgacctatatctacactgggctgtccaagcatgttgaagacgtccccgcgtttcaggcccttggctcactcaatgacctccagttctttagatacaacagtaaagacaggaagtctcagcccatgggactctggagacaggtggaaggaatggaggattggaagcaggacagccaacttcagaaggccagggaggacatctttatggagaccctgaaagacattgtggagtattacaacgacagtaacgggtctcacgtattgcagggaaggtttggttgtgagatcgagaataacagaagcagcggagcattctggaaatattactatgatggaaaggactacattgaattcaacaaagaaatcccagcctgggtccccttcgacccagcagcccagataaccaagcagaagtgggaggcagaaccagtctacgtgcagcgggccaaggcttacctggaggaggagtgccctgcgactctgcggaaatacctgaaatacagcaaaaatatcctggaccggcaagatcctccctctgtggtggtcaccagccaccaggccccaggagaaaagaagaaactgaagtgcctggcctacgacttctacccagggaaaattgatgtgcactggactcgggccggcgaggtgcaggagcctgagttacggggagatgttcttcacaatggaaatggcacttaccagtcctgggtggtggtggcagtgcccccgcaggacacagccccctactcctgccacgtgcagcacagcagcctggcccagcccctcgtggtgccctgggaggccagctaggaagcaagggttggaggcaatgtgggatctcagacccagtagctgcccttcctgcctgatgtgggagctgaaccacagaaatcacagtcaatggatccacaaggcctgaggagcagtgtggggggacagacaggaggtggatttggagaccgaagactgggatgcctgtcttgagtagacttggacccaaaaaatcatctcaccttgagcccacccccaccccattgtctaatctgtagaagctaataaataatcatccctccttaaaaaaaaaaa

SEQ ID NO: 135 - DNA, 4211 bp, Homo sapiens
cccctccctggacacccaggcgacaatggcagaactgcccacaacagagacgcctggggacgccactttgtgcagcgggcgcttcaccatcagcacactgctgagcagtgatgagccctctccaccagctgcctatgacagcagccaccccagccacctgacccacagcagcaccttctgcatgcgcacctttggctataacacgatcgatgtggtgcccacatatgagcactatgccaacagcacccagcctggtgagccccggaaggtccggcccacactggctgacctgcactccttcctcaagcaggaaggcagacacctgcatgccctggcctttgacagccggcccagccacgagatgactgatgggctggtggagggcgaggcaggcaccagcagcgagaagaaccccgaggagccagtgcgcttcggctgggtcaagggggtgatgattcgttgcatgctcaacatttggggcgtgatcctctacctgcggctgccctggattacggcccaggcaggcatcgtcctgacctggatcatcatcctgctgtcggtcacggtgacctccatcacaggcctctccatctcagccatctccaccaatggcaaggtcaagtcaggtggcacctacttcctcatctcccggagtctgggcccagagcttgggggctccatcggcctcattttcgctttcgccaatgccgtgggtgtggccatgcacacggtgggctttgcagagaccgtgcgggacctgctccaggagtatggggcacccatcgtggaccccattaacgacatccgcatcattggcgtggtctcggtcactgtgctgctggccatctccctggctggcatggagtgggagtccaaggcccaggtgctgttcttccttgtcatcatggtctcctttgccaactatttagtggggacgctgatccccccatctgaggacaaggcctccaaaggcttcttcagctaccgggcggacatttttgtccagaacttggtgcctgactggcggggtccagatggcaccttcttcggaatgttctccatcttcttcccctcggccacaggcatcctggcaggggccaacatatctggtgacctcaaggaccctgctatagccatccccaaggggaccctcatggccattttctggacgaccatttcctacctggccatctcagccaccattggctcctgcgtggtgcgtgatgcctctggggtcctgaatgacacagtgacccctggctggggtgcctgcgaggggctggcctgcagctatggctggaacttcaccgagtgcacccagcagcacagctgccactacggcctcatcaactattaccagaccatgagcatggtgtcaggcttcgcgcccctgatcacggtggtcatcttcggggccaccctctcctctgccctggcctgccttgtctctgctgccaaagtcttccagtgcctttgcgaggaccagctgtacccactgatcggcttcttcggcaaaggctatggcaagaacaaggagcccgtgcgtggctacctgctggcctacgccatcgctgtggccttcatcatcatcgctgagctcaacaccatagcccccatcatttccaacttcttcctctgctcctatgccctcatcaacttcagctgcttccacgcctccatcaccaactcgcctgggtggagaccttcattccaatactacaacaagtgggcggcgctgtttggggctatcatctccgtggtcatcatgttcctcctcacctggtgggcggccctcatcgccattggcgtggtgctcttcctcctgctctatgtcatctacaagaagccagaggtaaattggggctcctcggtacaggctggctcctacaacctggccctcagctactcggtgggcctcaatgaggtggaagaccacatcaagaactatcgcccccagtgcctggtgctcacggggccccccaacttccgcccggccctggtggactttgtgggcaccttcacccggaacctcagcctgatgatctgtggccacgtgctcatcggaccccacaagcagaggatgcctgagctccagctcatcgccaacgggcacaccaagtggctgaacaagaggaagatcaaggccttctactcggatgtcattgccgaggacctccgcagaggcgtccagatcctcatgcaggccgcaggtctcgggagaatgaagcccaacattctggtggttgggttcaagaagaactggcagtcggctcacccggccacagtggaagactacattggcatcctccatgatgcctttgatttcaactatggcgtgtgtgtcatgaggatgcgggagggactcaacgtgtccaagatgatgcaggcgcacattaaccccgtgtttgacccagcggaggacgggaaggaagccagcgccagagtggaccccaaggccctggtgaaggaggagcaggccaccaccatcttccagtcggagcagggcaagaagaccatagacatctactggctctttgacgatggaggcctcaccctcctcattccctatctccttggccgcaagaggaggtggagcaaatgcaagatccgtgtgttcgtaggcggccagattaacaggatggaccaggagagaaaggcgatcatttctctgctgagcaagttccgactgggattccatgaagtccacatcctccctgacatcaaccagaaccctcgggctgagcacaccaagaggtttgaggacatgattgcacccttccgtctgaatgatggcttcaaggatgaggccactgtcaacgagatgcggcgggactgcccctggaagatctcagatgaggagattacgaagaacagagtcaagtcccttcggcaggtgaggctgaatgagattgtgctggattactcccgagacgctgctctcatcgtcatcactttgcccatagggaggaaggggaagtgccccagctcgctgtacatggcctggctggagaccctgtcccaggacctcagacctccagtcatcctgatccgaggaaaccaggaaaacgtgctcaccttttactgccagtaactccaggctttgacatccctgtccacagctctgagtgtgtgggataagttggaacttgattgcctctagtccacagggatgagactcatgttctgttgcactttaagtggcagcatctgatgatctcacccgaaaaagatggtagatttccaaatctggctggactccacttccatgggacacattccctgggtcttgtgtttatgggctagagaaatagcagatggagctgcaaggaaaactctctaaagcatcctattccttttaaaggatttcttttgattttgatgaccattaattaagagttcagtctttgatttgtatgcaaattggagtcccaatgctgggcgtgaatcttgacagtttctacagaccttcctgggtgaaagttcctaaatcatgccttgcttcctccaataggagaatgggagcctcacctgtaggacctacaggctctctaaggaatgcaggtctctctctgagcctccacagccaggcaaatacatatatatatatttttttttagatgaagttttttctcttgttgcccaggctagggtgtaatggcatgatctcaggtcactgcaacctcctcccgggttcaagcatttcttctgtctcagcctcccgaatagctgggattacaggcacctgccatcacaccagctaatttttgtatttttagtagagatggggtttcaccatgttgaccaggctggtgttgagctcctgacctcaggtgatccacccacctcggtctcccaaagtgctggggttacaggcctgagccactgcgcccggcccaggcaaatttcttgaaccacttctcactcccgtcactttcaataaggggtctttgatgtcttcactggttctttggacgagggacttttcgaacttttttggttgcaacacacagtaagaaatatatttcacactgagacttgcagcgcacacacacggaaacgaccaaaacaaaaatgtcacaaaacaatacttacccttccctgggggacgtcctccagtatgttctgttctgtttatttttcactgttggttgcaatccaataaaatgactttgggatccactcatgggtggggacccacacatttgaaaccg

SEQ ID NO: 136 - DNA, 403 bp, Homo sapiens
gctaccatggtctccggcagcaacggcctcgccgccgcccgtctcctgtcgcgcagcttcctcctgcaacagaatggaattcagcattgttcctacacagcttctcggcaacatctctatgttgataaaaatacaaagattatttgccagggtttcactggcaaacagggcacctttcacagccagcaggcattggaatatggcaccaaactcgttggaggaaccactccagggaaaggaggccagacacatctgggcttacctgtctttaatactgtgaaggaggccaaagaacagacaggagcaacggcttctgtcatttatgttcctccgccttttgctgctgctgccattaatgaagctattgaggcagaaattcccttggttgtgtgtatcactgaag

SEQ ID NO: 137 - DNA, 1236 bp, Homo sapiens
agcctaaccctcacatgcatttttctctccctctgtatagggtgacagtggagggcctctggtttgcttcgagaaggacaaatacattttacaaggagtcacttcttggggtcttggctgtgcacgccccaataagcctggtgtctatgttcgtgtttcaaggtttgttacttggattgagggagtgatgagaaataattaattggacgggagacagagtgacgcactgactcacctagaggctgggacgtgggtagggatttagcatgctggaaataactggcagtaatcaaacgaagacactgtccccagctaccagctacgccaaacctcggcattttttgtgttattttctgactgctggattctgtagtaaggtgacatagctatgacatttgttaaaaataaactctgtacttaactttgatttgagtaaattttggttttggtcttcaacattttcatgctctttgttcaccccaccaattttaaatgggcagatggggggatttagctgcttttgataaggaacagctgcacaaaggactgagcaggctgcaaggtcacagaggggagagccaagaagttgtccacgcatttacctcatcagctaacgagggcttgacatgcatttttactgtctttattcctgacactgagatgaatgttttcaaagctgcaacatgcatggggagtcatgcgaaccgattctgttattgggaatgaaatctgtcaccgactgcttgacttgagcccaggggacacagagcagagagctgtatatgatggagtgaaccggtccatggatgtgtaacacaagaccaactgagagtctgaatgttattctggggcacacgtgagtctaggattggtgccaagagcatgtaaatgaacaacaagcaaatattgaaggtggaccacttatttcccattgctaattgcctgcccggttttgaaacagtctgcagtacacacggtgacaggagaatgacctgtgggagagatacatgtttagaaggaagagaaaggacaaaggcacacgttttaccatttaaaatattgttaccaaacaaaaatatccattcaaaatacaatttaacaatgcaacagtcatcttacagcagagaaatgcagagaaaagcaaaactgcaagtgactgtgaataaagggtgaatgtagtctcaaatcctcaaagagctgtgtttatttcattgacaaatagattatttgtattca

SEQ ID NO: 138 - DNA, 1763 bp, Homo sapiens
agagatccagcaggtgctgcaccatgagtgtctctgtgctgagccccagcagactcctgggtgatgtctctggaatcctccaagcggcctccctgctcattctgcttctgctgctgatcaaggcagttcagctctacctgcacaggcagtggctgctcaaagccctccagcagttcccgtgccctccctcccactggctcttcgggcacatccaggagctccaacaggaccaggagctacaacggattcagaaatgggtggagacattcccaagtgcctgtcctcattggctatggggaggcaaagttcgtgtccagctctatgaccctgactatatgaaggtgattctggggagatcagacccgaaatcccatggttcctacagattcctggctccatggattgggtacggcttgctcctgttgaatgggcagacatggttccagcatcgacggatgctgaccccagccttccactatgacatcctgaagccctatgtggggctcatggcagactctgtacgagtgatgctggacaaatgggaagagctccttggccaggattcccctctggaggtctttcagcacgtctccttgatgaccctggacaccatcatgaagtgtgccttcagccatcagggcagcatccaggtggacaggaattctcagtcctacatacaggccattagtgacctgaacaacctggttttttcccgtgtgaggaatgcctttcaccagaatgacaccatctacagcctgacctctgctggccgctggacacaccgcgcctgccagctgtcccatcagcacacgagacccaaagtgatccaactgaggaaggctcaactacagaaggagggggagctggagaagatcaagaggaagaggcatttggattttctggatatcctcctcttggccaaaatggagaatgggagcatcttgtcagacaaggacctccgtgctgaggtggacacgttcatgtttgagggccacgacaccacagccagtgggatctcctggatcctctatgctctggccacacaccccaagcatcaggagaggtgccgggaggagatccacagcctcctgggtgatggagcctccatcacctggaaccacctggaccagatgccctacaccaccatgtgcattaaggaggcactgaggctctacccaccggtgccaggcattggcagagagctcagcactcccgtcaccttccctgatgggcgctccttgcccaaaggtatcatggtcctcctctccatttatggccttcaccacaacccaaaagtgtggcccaacccagaggtgtttgaccctttccgttttgcaccgggttctgctcaacacagccacgctttcctgcccttctcaggaggatcaaggaactgcattgggaaacaatttgccatgaacgagctgaaggttggccagcaggccctgaccctcgtccgctttgagctgctgcctgatcccaccaggatccccatccccattgcacgacttgtgttgaaatccaaaaatggaatccacctgcgtctcaggaggctccctaacccttgtgaagacaaggaccagctttgagggcctccacctgccgtcctgtcttcctgacccccgcttctgtccccttcctgtctgcccatatcctgttttctgtctgcccatacacctgtctccttcttcctgcctgcttgtctgttcctatattagtttcctattactgctgtaataaactatcacaatctcagtgatttt

SEQ ID NO: 139 - DNA, 3687 bp, Homo sapiens
acctccacctggctaggggagttgaacttggaggccgaaggctgacctcagctttgctctgaaacagattcgccacttgagagagagaggcctggagttcttatctgttccctccacgtactcattaagtgtggcctgagtagaatagcccggtcatgttcagttcttcctcgcgctgctgacctcatggcctagaagtctctgtcccaatgaattataaccaaactgagagtgtcctgtgtgccaggtctgttccaaagagcggtgcttatctcctttaatcccacccacactattctcgttccagtttacaaatgaggctcaaaggratatggtgattttcccaagtcacactgtatgtaacagagccaggatgcaaaccttctccggccgtgcctctcagagctatggaatacaacgctgtgacgcaaacaggactttggggccagtctccaaatgccccctcaaatttcctctaggcaagagttctggagccgccactgractccagccggccttggcttctgagctttggattctgggcagtaatggtcacattcccagcgtcctggaaaagcttgcccttggcttctggccctgactctgcctcccactgactagtggacgtcaactgcccctctctgggcctggcaacaccatcctgttcaatgaggctgcggctggatcagaggtccccaggcctggaaccttccagggctgggctcagctcccccaacccccatccccccaggtaggccaggaggctgggcgggacctgcttggggttaaatactccggcccagcactccccaggcctctagtcccagtaggaggtttgactaagatcaatcatggtaagtgccatggccatctccccttgggtgggacatcttcagtaacgcttccagaagcaccttgtgttggaacctccaagtctcactgtccttctttttctccttagacgacttacagtgacaaaggggcaaaggtaagcaggcgaaatgttgggaaatgtagggcacctcacctcttctctccttctgcagcctgagagaggccgattcctccacttccactctgtgaccttctgggttggcaacgccaagcaggtagaagccggggcaaggtgctggagtgagcagacggcagggcagagggctgcctgacaagggcaggcctccagcagggtctgtgattggcccttgggagggaggatcaggccaggggtgggccagatactctgaatcctaattacaccagcgggaaagttatctgtcagcaaaatgtgcaggcagcagtctatcttcccaggagggtctctgcccctgaggcaatagggcaggcaggctgaggggggccaggggctctcttgcggaagtcccccatgctggccccttgaccctcatgaaccctgctgcaaccctgtgattcaggccgcgtcattctactgcagcaagatgggctttgaacctctagcctacaggggcctggagaccggttcccgggaggtggtcagccatgtaatcaaacaagggaaggtgagtcaccacccccaggacactgggccactagcctcacctccttctcctatcttagattgtgtttgtcctctcctcagcgctcaacccctggaacaaaggtggaggtgcccggggagggtggacgcatggctctgtgggtgggatctgggttctggagggtggcgctaggctccgtgggtgggctctgggttcaggcctggatggagactaaaagccaggtgaggggacctagactccagactccagtgccatcctctccctgccggccacagagatgggcgatcacctggtgaaacacggtgacggagtgaaggacattgcgttcgaggtggaagattgtgactacatcgtgcaggtaagaaagcacctggagaaactggaggggcctgcagaaagcacgggaacggggcgccaaaatcatgcgggagccctgggtagagcaagacaagtttgggaaggtgaagtttgctgtgctgcagacggtgagttccctttggtgcccccacccctcctgctgtcggcaccactgccgagccaggctgttttccacccgtagtatggggacaccacacacaccctggtggagaagatgaactacatcggccaattcttgcctggatatgaggccccagcgttcatggaccccctacttcctaaactgtgagtgtccctcagggcagaggtgggtggaaagccttctcacccccatcttcttcccttcccaggcccaaatgcagtctggagatgatcgaccacattgtgggaaaccagcctgatcaggagatggtgtccgcctccgaatggtgagaccttgcccctctccctctgcgtgaagagcatatgtgttccaccgcccaccctacaggtacctgaaaaacctgcagttccaccgcttctggtccgtggatgacacgcaggtgcacacggaatatagctctctgcgatccattgtggtggccaactatgaagagtccatcaagatgcccatcaatgagccagcgcctggcaagaagaagtcccagatccaggtgaggccggccctggctggggragaggggcgcagggaagaggtctgggggctcttgtagggtcagggatgtgggtgatggggcaaatgacagtggtctccttgtttccctcccccaggaatatgtggactataacgggggcgctggggtccagcacatcgctctcaagaccgaagacatcatcacagcggttagaacccccttgcctgtgcgaattcctctctcatggaggccgaaggctgacctcagctttgctctgaaacagattcgccacttgagagagagaggcctggagttcttatctgttccctccacgtactacaaacaactgcgggagaagctgaagacggccaagatcaaggtgaaggagaacattgatgccctggaggtgaggcccaggcaggatccctcgagggatctcaccgtgcagttcccctagcagagcccctgtttcccgcctaggagctgaaaatcctggtggactacgacgagaaaggctacctcctgcagatcttcaccaaaccggtgcaggaccggcccacgctcttcctggaagtcatccagcgccacaaccaccaggtactgcttgtccccggcaggcccgaggggacaggcagctagcacactcggttttctgggtcctttgggtcatctcctctctttcccgccacagggttttggagccggcaacttcaactcactgttcaaggctttcgaggaggagcagaacctgcggggtaacctcaccaacatggagaccaatggggtggtgcccgggatgtaagcccccgcccaccccacggaggccacagccacacagccacgccccctgattctggaactcgcccaacttccctactggctgctccccttgggtcccgcccaccagcggactcggcccccaaggctccgcccacactgaccacgggcctcggcggggccgccctctgctccagccctcccgattaaagcgtgctccggtccaatactgtgtctgtgtttgtgttgcgcataaggcagtagtgcttatggcagccagggggaggccaggcaggccgccagcgccgcggcgaccgaggagctgcgggtgcgcagcgctttgccagcgggaccacgcg

SEQ ID NO: 140 - DNA, 4892 bp, Homo sapiens
ctgcagaaatgcctcctcagctgcaaaacggcctgaacctctcggccaaagttgtccagggaagcctggacagcctgccccaggcagtgagggagtttctcgagaataacgctgagctgtgtcagcctgatcacatccacatctgtgacggctctgaggaggagaatgggcggcttctgggccagatggaggaagagggcatcctcaggcggctgaagaagtatgacaactggtaagctcggcccccgctgcctgtcccagcaccctgcaggcagggctcccctgcgtctcctgggagttggtggagaaaggtgaatgaaggccttcgggtagtttcagactcttgagaagatgaatgcaatggtcagaaccatacagacttgaattttgtgacattagtgggccagcccaagctttaaatgaggtgtgtgcacaaaagctctgccaactagattcctgattaaaaaaaaggcagcccctctcctacagaccagctcctagtggagtaaatgtccacctggccatgtcttagacggtctgtgtgttcacagtgatggactgttgttagcgtgctcagcactctgctaggcatggaaagccacggtactgaaggagatggttcgctgcccgtggtgcttggctgaaaggaagcctgtgatttttgcagctggttggctctcactgaccccagggatgtggccaggatcgaaagcaagacggttatcgtcacccaagagcaaagagacacagtgcccatccccaaaacaggcctcagccagctcggtcgctggatgtcagaggaggattttgagaaagcgttcaatgccaggttcccagggtgcatgaaaggtgagcggaacattgatttgattgggtaaaacagcagagagccttttcttatttacatctatcctaatggtaattcaaacaataatggaagctccaccacctcagatgtctttcagttccatacatgaagttggcaatgtattgaaaatgcacatccctcttctgcttttacagactgtcttatacaaacgtgaaaactagttccatgcatatgggttttaaatagcttggtggacccaattgcacatttatgaaaactctttaatttcagcaggctgttcactttccagtggcctcttctaacccagggcctggtgaccagcagggtgtggtggtgttagtggaacaccgtgaaaatgggtctacctgggaaaaaaatgctggtcgtgttcgaagtccaaggtcatttctcaccagtgcccacccatcgcaccctgtaggtcgcaccatgtacgtcatcccattcagcatggggccgctgggctcacctctgtcgaagatcggcatcgagctgacggattcgccctacgtggtggccagcatgcggatcatgacgcggatgggcacgcccgtcctggaagcactgggcgatggggagtttgtcaaatgcctccattctgtggggtgccctctgcctttacaaagtaagtgtattatttcagaatcaaaagtcaaaataaaaaagaaagctgaacgcaaaccccagtgagtgcctcggggacccccaaccagggccctggcgcactgacttgggaggggtccttgttcacagagcctttggtcaacaactggccctgcaacccggagctgacgctcatcgcccacctgcctgaccgcagagagatcatctcctttggcagtgggtacggcgggaactcgctgctcgggaagaagtgctttgctctcaggaatgccagccggctggccaaggaggaagggtggctggcagagcacatgctggtgagctgcaggaagccctgatgtgcagatgagaggcctggggggtggcagaaacaaacagcattacagttcccacccgtcagcacacctctctgagcgtgcaggttcccggacagatcgggaaaccccaccagtaatgattagtttacacatatacatcgcttttgaagggcccccaaaacaccaggggaccatagagatccttttggacttcatgattcttgggagtgttgttgcactgatacctgaaggaatagatcttgagggcctacattccaacctctgggctgaagtaccaacctcggggagaaggaaacaaagatcacaataaagaatcttgtccccaacagattctgggtataaccaaccctgagggtgagaagaagtacctggcggccgcatttcccagcgcctgcgggaagtccaacctggccatgatgaaccccagcctccccgggtggaaggttgagtgcgtcggggatgacattgcctggatgaagtttgacgcacaaggtgactcttttagacccaactcttggtaacgattggactcaagcgaatcgttggccttcgaaacatgtcacattctcctcagtccagtgtttggatttttaaactctgttagtccagagttggccaagccttagaatatggatcctgtaagaattcttcaacttaatattcaatctggattgaaactgggccatatgttgctgtttgtttacatacatacatttgtttaaatggtattggtggaaaattgtggaggaagcaagagtcgtaaacgtatcaaagttgcatatgatgcttggatgaaaagagataaatgcatattctagggagggaaaaaagatttgagaagttggcatagaaattagtccggcaatatataagagtatatgttctgctttgcctggcactcactactgcttctctggtttaaaactctccaggtcatttaagggccatcaacccagaaaatggctttttcggtgtcgctcctgggacttcagtgaagaccaaccccaatgccatcaagaccatccagaagaacacaatctttaccaatgtggccgagaccagcgacgggggcgtttactgggaaggcattgatgagccgctagcttcaggcgtcaccatcacgtcctggaagaataaggagtggagctcagaggatggtgtgtccctgccagaggcctgtgtgtgccgggctgcagggactgcctgttttgagccaggcactcacgagcctttctctgtcttataggggaaccttgtgcccaccccaactcgaggttctgcacccctgccagccagtgccccatcattgatgctgcctgggagtctccggaaggtgttcccattgaaggcattatctttggaggccgtagacctgctggtgaggctctccttcatttaggctgggaacatgggtgtgctgggtaccgaaggcatctgtgaaatctctccttttccatgaccttgtcagagggtgcccaggggcttcctttcttgagcttccttcccaaagatccagaataattggcaagttcaaatgtagaaccaacccttctggtcacctggaacctttctgaatccttgatctattgtagcttgatcaaattttactttttactttgtggcctcagtcatgtaactttgagttagcagttttctgcaatttagcttggtgaatgcaaaactagctcgattacaagttattgtcttgccgtgtctttccgtgttgtgaataacaccactggttgtggagtctgaatttcaaagcctctgatgaacatttctctttttttttcctgctaaaggtgtccctctagtctatgaagctctcagctggcaacatggagtctttgtgggggcggccatgagatcagaggccacagcggctgcagaacataaaggtaaatcaaagtcctgatctgaaaccacagagaagtgggattagagcactcttcgtcactcttatgtctctctccttttctgtgtctgtgtgtggggagagagagagagagaaagagagagaggagaacaaagcatgctaatgtcaacaatcaatggcgtcagtcttgcctaggagagcctcatttactaatgaactccctctctgtttaacaggcaaaatcatcatgcatgacccctttgccatgcggcccttctttggctacaacttcggcaaatacctggcccactggcttagcatggcccagcacccagcagccaaactgcccaagatcttccatgtcaactggttccggaaggacaaggaaggcaaattcctctggccaggctttggagagaactccagggtgctggagtggatgttcaaccggatcgatggaaaagccagcaccaagctcacgcccataggctacatccccaaggaggatgccctgaacctgaaaggcctggggcacatcaacatgatggagcttttcagcatctccaaggaattctgggagaaggaggtggaagacatcgagaagtatctggaggatcaagtcaatgccgacctcccctgtgaaatcgagagagagatccttgccttgaagcaaagaataagccagatgtaatcagggcctgagtgctttacctttaaaatcattccctttcccatccataaggtgcagtaggagcaagagagggcaagtgttcccaaattgacgccaccataataatcatcaccacaccgtgagcagatctgaaaggcacactttgatttttttaaggataagaaccacagaacactgggtagtagctaatgaaattgagaaggaaatcttagcatgcctccaaaaattcacatccaatgcatagtttgttcaaatttaaggttactcaggcattgatcttttcagtgttttttcactttagctatgtggattagctagaatgcacaccaaaaaaatacttgagctgtatatatatatgtgtgtgtgtgtgtgtgtgtgtgtgtgtgtgcatgtatgtgcacatgtgtctgtgtggatatttgtgtatgtgtatttgtatgtactgttattgaaaatatatttaatacctttggaaaaatcttgggcaagatgacc

SEQ ID NO: 141 - DNA, 695 bp, Homo sapiens
gccatttctcttggttccaggtgttctcctacatagccactctgctctacgtggtccatgcggtgttctctttaatcagatggaagtcttcataaagccgcagtagaacttgagctgaaaacccagatggtgttaactggccgccccactttccggcataactttttagaaaacagaaatgcccttgatggtggaaaaaagaaaacaaccacccccccactgcccaaaaaaaaaagccctgccctgttgctcgtgggtgctgtgtttactctcccgtgtgccttcgcgtccgggttgggagcttgctgtgtctaacctccaactgctgtgctgtctgctagggtcacctcctgtttgtgaaaggggaccttcttgttcgggggtgggaagtggccaccgtgacctgagaaggaaagaaagatcctctgctgacccctggagcagctctcgagaactacctgttggtattgtccacaagctctcccgagcgccccatcttgtgccatgttttaagtcttcatggatgttctgcatgtcatgcggactaaaactcacccaacagatctttccagaggtccatggtggaagacgataaccctgtgaaatactttataaaatgtcttaatgttcaatacatttgttgggtgttttttgggtttgggttgaattcctcagcatcaagaataccatcaatt

SEQ ID NO: 142 - DNA, 1922 bp, Homo sapiens
gagacctgggcgttggtgaaggcgaggggaaagccagaatactggggtggcggacgccaaggggcgggtgtagcaggcaacctcagggaagctgggaaggcctagcagggtgagagaacccgcacacggggggcacagcgcctccctcgcgagccggtgcgaaaggggccgcctgcggtgtgcgcccagctgcgctcaagggaccttgcacttggcccatctcctgcgcacagcccaggccgggaccgcgggcggtgcggactcagcgggctgggtgcaagggcggggcggggcgtctgcgcccggccccgtctcctgactataaaagcagccgctggctgttgggctccactccgccttccacgtgcacccactgcctcttcccttctcgcttgggaactctagtctcgcctcgggttgcaatggaccccaactgctcctgtgccgctggtaagggacgcccgggttctgtgccttggaatgccaaattcccagacaccatagagagtgtccctgggtttgaggaggtcgtattttgctatcagaggtaaggggactcctttattggtccagtgctttcctgttggccaagctcctgagggcattttcctcctccctgttcctctatgtcagagttgagggtcctgaggctcaaggctgtcctgctcatgtcagagttgagggtcctgaggctcaaggctgtcctgcctcacgtcacctagttggtcacagggctgctggctgagccccaattctctaacctgactctgagctaccggattggataggagacattggataggagggacattgcctcttccaagttcaggacagaaagtcgaagtcttcctaggccgtgatctgcagggactttcctttggagtagaaataggagggtgcttggttttcccagcatgaatggagaggacatggggcttctcttcctcgtctctgagtgggaaaggagctctgacggctggctctggcacagagaagggggaagtggacactcattgacccactgctgtaccttctgcatctcactcaccgttcactggctttttctcttctagcaggtgtctcctgcacctgcgccagctcctgcaagtgcaaagagtgcaaatgcacctcctgcaagaagagtgagtgcggggccatctccaggaatctggggctgtggctaaggttgggagggaacccaaggctgtccctgagtgcctgcttctggggaaccggccttcctttgtccctgtaggttgtcacgcctgtctagtcttctgcactttccaaggcttatgtgaggtggggcagctttctcaaaggaagacccattccaatgtccaccagttgtctcctgacaaaaaccatgccatcatgaactaagggtcctctggggctggagggatggagacaggcctctgttggggcagggagttctatgatcgagtctgctctgacctctcaatctcctttcctccccaaggctgctgctcctgctgccctgtgggctgtgccaagtgtgcccaaggctgcatctgcaaaggggcatcggagaagtgcagctgctgcgcctgatgtcgggacagccctgctcccaagtacaaatagagtgacccgtaaaatctaggattttttgttttttgctacaatcttgacccctttgctacattcccttttttctgtgaaatatgtgaataataattaaacacttagacttgattcccgttctggttcctgttgtgtttttggaatgagggactggggtgggagattgaactgggagttcacactgggctctggacggaaatgtgagtgctaaacaagctgagcgccttcaggcagccccgttacttctctgacctccttcctctgtaaaaggcacctgcaccgtgccggatgatatggggatggggacatacgcg

SEQ ID NO: 143 - DNA, 2139 bp, Homo sapiens
ggggaggactgacaggggcctgatggaggagttggtggggctgcgtgagggcttctcaggggaccctgtgactctgcaggagctgtggggcccctgtccccacatccgccgagccatccaaggtggcctggagtggctaaagcagaaggtgttccgcctgggagaagactggtacttcctgatgaccctcggggtgctcatggccctggtcagctatgccatgaactttgccatcgggtgtgtggtccgagcacaccagtggctgtacagggagattggggacagccacctgctccggtatctttcctggactgtgtaccctgtggccctcgtctctttctcctcaggcttctcccagagcatcacgccctcctctggaggttctggaatcccggagctgaagaccatgttggcgggtgtgatcttggaggactacctggatatcaagaactttggggccaaggtggtgggcctctcctgcaccctggccaccggcagcaccctgttcctgggcaaagtgggccctttcgtgcacctgtctgtaatgatcgctgcctacctgggccgtgtgcgcaccacgaccatcggggagcctgagaacaagagcaagcaaaacgaaatgctggtggcagcggcggcagtgggcgtggccacagtctttgcagctcccttcagcggcgtcctgttcagcatcgaggtcatgtcttcccacttctctgtccgggattactggaggggcttctttgcggccacctgcggggccttcatattccggctcctggcagtcttcaacagcgagcaggagaccatcacctccctctacaagaccagtttccgggtggacgttcccttcgacctgcctgagatcttcttttttgtggcgctgggtggcatctgcggcgtcctgagctgtgcttacctcttctgtcagcgaaccttcctcagcttcatcaagaccaatcggtacagctccaaactgctggctactagcaagcctgtgtactccgctctggccaccttgcttctcgcctccatcacctacccgcctggtgtgggccacttcctagcttctcggctgtccatgaagcagcatctggactcgctgttcgacaaccactcctgggcgctgatgacccagaactccagcccaccctggcccgaggagctcgacccccagcacctttggtgggaatggtaccacccgcggttcaccatctttgggacccttgccttcttcctggttatgaagttctggatgctgattctggccaccaccatccccatgcctgccgggtacttcatgcccatctttatccttggagctgccatcgggcgcctcttgggagaggctcttgccgtcgccttccctgagggcattgtgactggaggggttaccaatcccatcatgcccggggggtatgctctggcaggggctgcagccttctcaggggctgtgacccacaccatctccacggcgctgctggcctttgagctgaccggccagatagtgcatgcactgcccgtgctgatggcggtgctggcagccaacgccattgcacagagctgccagccctccttctatgatggcaccatcattgtcaagaagctgccatacctgccacggattctgggccgcaacatcggctcccaccatgtgagggtggagcacttcatgaaccacagcatcaccacactggccaaggacacgccgctggaggaggtggtcaaggttgtgacctccacagacgtgaccgagtatcccctggtggagagcacagagtcccagatcctggtaggcatcgtgcagagggcccagctggtgcaggccctccaggctgagcctccttccagggctccaggacaccagcagtgtctccaggacatcttggccaggggctgccccacggaaccagtgaccctgacgctattctcagagaccaccttgcaccaggcacaaaacctctttaagctgttgaaccttcagtccctcttcgtgacatcgcggggcagagctgtgggctgcgtgtcctgggtggagatgaagaaagcaatttccaacctgacaaatccgccagctccaaagtgagccggcccagcaagatgaaacagggcaccccagctgacctggtactgaggccg

SEQ ID NO: 144 - DNA, 2163 bp, Homo sapiens
cggcagccacagcaggaggactgacaggggcctgatggaggagtttgtggggctgcgtgaaggctcctcagggaaccctgtgactctgcaggagctgtggggcccctgtcccctcatccgccgaggcatccgaggtggcctggagtggctgaagcagaagctcttccgcctgggcgaggactggtacttcctgatgaccctcggggtgctcatggccctggtcagctgtgccatggacttggctgttgagagtgtggtccgagcgcaccagtggctgtacagggagattggggacagccacctgctccggtatctctcctggactgtgtaccctgtggccctcgtctctttctcttcgggcttctctcagagcatcacaccctcctctggaggttctggaatcccggaggtgaagaccatgttggcgggtgtggtcttggaggactacctggatatcaagaactttggggccaaagtggtgggcctctcctgcaccctggcctgtggcagcaccctcttcctcggcaaagtgggccctttcgtgcacctgtctgtgatgatggctgcctacctgggccgtgtgcgcaccacgaccatcggggagcctgagaacaagagcaagcaaaacgaaatgctggtggcagcggcggcagtgggcgtggccacagtctttggcgctcccttcagcggcgtcctgttcagcatcgaggtcatgtcttcccacttctctgtctgggattactggaggggcttctttgcggccacctgcggggccttcatgttccggctcctggcggtcttcaacagcgagcaggagaccatcacctccctctacaagaccagtttccgggtggacgttcccttcgacctgcctgagatcttcttttttgtggtgctggggggtctctgcggcatcctgggcagcgcttacctcttctgtcagcgaatcttctttggcttcatcaggaacaataggttcagctccaaactgctggccaccagcaagcctgtgtactccgctctggccaccttggttctcgcctccatcacctacccacccagcgccggccgcttcctagcttctcggctgtccatgaagcagcatctggactcgctgttcgacaaccactcctgggcgctgatgacccagaactccagcccaccctggcccgaggagctcgacccccagcacctgtggtgggaatggtaccacccgcggttcaccatctttgggacccttgccttcttcctggttatgaagttctggatgctgattctggccaccaccatccccatgcctgccgggtacttcatgcccatctttgtctatggagctgctatcgggcgcctctttggggagactctctcttttatcttccctgagggcatcgtggctggagggatcaccaatcccatcatgccaggggggtatgctctggcaggggctgcagccttctcaggggctgtgacccacaccatctccacggcgctgctggccttcgaggtgaccggccagatagtgcatgcactgcccgtgctgatggcggtgctggcagccaacgccattgcacagagctgccagccctccttctatgatggcaccgtcattgtcaagaagctgccatacctgccacggattctgggccgcaacatcggttcccaccgcgtgagggtggagcacttcatgaaccacagcatcaccacactggccaaggacacgccactggaggaggtggtcaaggttgtgacctccacagacgtggccgagtatcccttggtggagagcacagagtcccagatcctggtgggcatagtgcgaagggcccagctggtgcaggccctgaaggctgagcctccttcctgggctcctggacaccagcagtgtctccaggacatcttggctgcaggctgccccacagaaccagtgaccctgaagctgtccccagagacttccctgcatgaggcacacaacctctttgagctgttgaaccttcattccctctttgtgacgtcgcggggcagagctgtgggctgcgtgtcctgggtggagatgaagaaagcaatttccaacctgacaaatccgccagccccaaagtgagccggcccagcaagatgaaacagggcaccccagctgccctggtactgaggttgggctgagaccct

SEQ ID NO: 145 - DNA, 1669 bp, Homo sapiens
gctaggcagcttcgaaccagtgcaatgacgatgccagtcaacggggcccacaaggatgctgacctgtggtcctcacatgacaagatgctggcacaacccctcaaagacagtgatgttgaggtttacaacatcattaagaaggagagtaaccggcagagggttggattggagctgattgcctcggagaatttcgccagccgagcagttttggaggccctaggctcttgcttaaataacaaatactctgaggggtacccgggccagagatactatggcgggactgagtttattgatgaactggagaccctctgtcagaagcgagccctgcaggcctataagctggacccacagtgctggggggtcaacgtccagccctactcaggctcccctgcaaactttgctgtgtacactgccctggtggaaccccatgggcgcatcatgggcctggaccttccggatgggggccacctgacccatgggttcatgacagacaagaagaaaatctctgccacgtccatcttctttgaatctatgccctacaaggtgaacccagatactggctacatcaactatgaccagctggaggagaacgcacgcctcttccacccgaagctgatcatcgcaggaaccagctgctactcccgaaacctggaatatgcccggctacggaagattgcagatgagaacggggcgtatctcatggcggacatggctcacatcagcgggctggtggcggctggcgtggtgccctccccatttgaacactgccatgtggtgaccaccaccactcacaagaccctgcgaggctgccgagctggcatgatcttctacaggaaaggagtgaaaagtgtggatcccaagactggcaaagagattctgtacaacctggagtctcttatcaattctgctgtgttccctggcctgcagggaggtccccacaaccacgccattgctggggttgctgtggcactgaagcaagctatgactctggaatttaaagtttatcaacaccaggtggtggccaactgcagggctctgtctgaggccctgacggagctgggctacaaaatagtcacaggtggttctgacaaccatttgatccttgtggatctccgttccaaaggcacagatggtggaagggctgagaaggtgctagaagcctgttctattgcctgcaacaagaacacctgtccaggtgacagaagcgctctgcggcccagtggactgcggctggggaccccagcactgacgtcccgtggacttttggaaaaagacttccaaaaagtagcccactttattcacagagggatagagctgaccctgcagatccagagcgacactggtgtcagagccaccctgaaagagttcaaggagagactggcaggggataagtaccaggcggccgtgcaggctctccgggaggaggttgagagcttcgcctctctcttccctctgcctggcctgcctgacttctaaaggagcgggcccactctggacccacctggcgccacagaggaagctgcctgccggagacccccacctgagagatggatgagctgctccaaagggaactgttgacactcgggccctttgagggggtttcttttggacttttttcatgttttcttcacaaatcaaaatttgtttaagtctcattgttagtaattct

SEQ ID NO: 146 - DNA, 336 bp, Homo sapiens
gtttcactaacaggaacaaagacagaaaccatgacagggctgccccgccaggccccgggtggggtttgtctgcacttggtgctctggccacaccagccacttttggtgacatgacccttccaagaatctttggttcaaggagcaccagttccctctcattcttgaagcagggagaaattgacctttgccttgtcgcccaggaagtggggctcggcacccataactaacacctcccacccttggaaaccatgtcttctggggtgagatgaccattctgggtctaagactgtttcaaagaagagctcatagactgactgtcagaagacagagggtaca

SEQ ID NO: 147 - DNA, 156 bp, Homo sapiens
aacgcgccgagaggaaggtggccaaggccccaatgaagctgggagcccggaagctggactgaaccgtggcggtggccttccaggctgcggagagcccgccccacagatgtatttattgtacaaaccatgtgagccggccggcccagccaggcatct

SEQ ID NO: 148 - DNA, 366 bp, Homo sapiens
caaacatcagtttgccctctatgtcctttgttgaagatgtcaccataggagaaggggagtcaatacctccggatactcagtttgtaaaaacatggcggatccagaattctgatgtcatctgggtgattctcagtgtggaggtgggtggacttttaggagtaacgcagcagctgtcatcttttgaaacggagttcaacacacagccgcatcgtaaggtagaaggaaacttcaacccttttgcctctccccaaaagaaccgacaatcagatgaaaacaacttaaaagaccctgggggctccgagttcgactcgatcagcaaaaacacatgggctcctgctcctgacacatgggctcctgctcctgacc

SEQ ID NO: 149 - DNA, 291 bp, Homo sapiens
  misc_feature (1)...(291): n=a,t,g or c
gatttaagatttggggggttaaaaaagaaaacttaactttataaaattatttatnctatttnaagccttctatcatatttccccatccaattgtttggtttcagtggtccagctttatttacaggcatataaaatgaaattgtgagatgttttgcaagcttctttttactttgagtagcttttaatttgtatgtttttatgtggatgaagagcatttttaatgcttttgtgcaataggntccaatatgcatttattagacatctgtttaaatggtaatgtagcatttattt

SEQ ID NO: 150 - DNA, 485 bp, Homo sapiens
gaaatggatgagatgatggcggccatggtgctgacgtccctgtcctgcagccctgttgtacagagtcctcccgggaccgaggccaacttctctgcttcccgtgcggcctgcgacccatggaaggagagtggtgacatctcggacagcggcacagcactaccagcggtcactggagtgggagcagtggtgtctccaccccctcgtccccccacccccaggccagccccaagtatttgggggatgcttttggttctccccaaactgatcatggctttgagaccgatcctgaccctttcctgctggacgaaccagctccacgaaaaagaaagaactctgtgaaggtgatgtacaagtgcctgtggccaaactgtggcaaagttctgcgctccattgtgggcatcaaacgacacgtcaaagccctccatctgggggacacagtggactctgatcagttcaagcgggaggaggattctactacacagagg

SEQ ID NO: 151 - DNA, 448 bp, Homo sapiens
  misc_feature (1)...(448): n=a,t,g or c
caaagtggtcatcaggactctcagcacattcaagaacacggagattagtttccagctgggagaagagtttgatgaaaccactgcagatgatagaaactgtaagtctgttgttagcctggatggagacaaacttgttcacatacagaaatgggatggcaaagaaacaaattttgtaagagaaattaaggatggcaaaatggttatgacccttacttttggtgatgtggttgctgttcgccactatgagaaggcataaaaatgttcctgggtcggggcttggaagagctcttcagtttttctgtttcctcaagtctcagtggctatcctattacaacatgggctgatccattaattaggaaggttattccttggtgtgggaggtgggaaaatgggtggattttaaaaacttgtttactccaaggcaacttgcccaattttaatncggaaa

SEQ ID NO: 152 - DNA, 926 bp, Homo sapiens
ccagagaggggcaggcttgtcccctgacaggttgaagcaagtagacgcccaggagccccgggagggggctgcagtttccttccttccttctcggcagcgctccgcgcccccatcgcccctcctgcgctagcggaggtgatcgccgcggcgatgccggaggagggttcgggctgctcggtgcggcgcaggccctatgggtgcgtcctgcgggctgctttggtcccattggtcgcgggcttggtgatctgcctcgtggtgtgcatccagcgcttcgcacaggctcagcagcagctgccgctcgagtcacttgggtgggacgtagctgagctgcagctgaatcacacaggacctcagcaggaccccaggctatactggcaggggggcccagcactgggccgctccttcctgcatggaccagagctggacaaggggcagctacgtatccatcgtgatggcatctacatggtacacatccaggtgacgctggccatctgctcctccacgacggcctccaggcaccaccccaccaccctggccgtgggaatctgctctcccgcctcccgtagcatcagcctgctgcgtctcagcttccaccaaggttgtaccattgtctcccagcgcctgacgcccctggcccgaggggacacactctgcaccaacctcactgggacacttttgccttcccgaaacactgatgagaccttctttggagtgcagtgggtgcgcccctgaccactgctgctgattagggttttttaaattttattttattttatttaagttcaagagaaaaagtgtacacacaggggccacccggggttggggtgggagtgtggtggggggtagtttgtggcaggacaagagaaggcattgagctttttctttcattttcctattaaaaaatacaaaaatcaaaacaaaaaaaa

SEQ ID NO: 153 - DNA, 1522 bp, Homo sapiens
aaaagaggaaaccaacccctaagatgagctttccatgtaaatttgtagccagcttccttctgattttcaatgtttcttccaaaggtgcagtctccaaagagattacgaatgccttggaaacctggggtgccttgggtcaggacatcaacttggacattcctagttttcaaatgagtgatgatattgacgatataaaatgggaaaaaacttcagacaagaaaaagattgcacaattcagaaaagagaaagagactttcaaggaaaaagatacatataagctatttaaaaatggaactctgaaaattaagcatctgaagaccgatgatcaggatatctataaggtatcaatatatgatacaaaaggaaaaaatgtgttggaaaaaatatttgatttgaagattcaagagagggtctcaaaaccaaagatctcctggacttgtatcaacacaaccctgacctgtgaggtaatgaatggaactgaccccgaattaaacctgtatcaagatgggaaacatctaaaactttctcagagggtcatcacacacaagtggaccaccagcctgagtgcaaaattcaagtgcacagcagggaacaaagtcagcaaggaatccagtgtcgagcctgtcagctgtccagagaaaggtctggacatctatctcatcattggcatatgtggaggaggcagcctcttgatggtctttgtggcactgctcgttttctatatcaccaaaaggaaaaaacagaggagtcggagaaatgatgaggagctggagacaagagcccacagagtagctactgaagaaaggggccggaagccccaccaaattccagcttcaacccctcagaatccagcaacttcccaacatcctcctccaccacctggtcatcgttcccaggcacctagtcatcgtcccccgcctcctggacaccgtgttcagcaccagcctcagaagaggcctcctgctccgtcgggcacacaagttcaccagcagaaaggcccgcccctccccagacctcgagttcagccaaaacctcccatggggcagcagaaaactcattgtccccttcctctaattaaaaaagatagaaactgtctttttcaataaaaagcactgtggatttctgccctcctgatgtgcatatccgtacttccatgaggtgttttctgtgtgcagaacattgtcacctcctgaggctgtgggccacagccacctctgcatcttcgaactcagccatgtggtcaacatctggagtttttggtctcctcagagagctccatcacaccagtaaggagaagcaatataagtgtgattgcaagaagtgtagaggaccgagccagaaatcttagagatttcttgtcccctctcaggtcatgtgtagatgcgataaatcaagtgattggtgtgcctgggtctcactacaagcagcctatctgcttaagagactctggagtttcttatgtgccctggtggacacttgcccaccatcctgtgagtaaaagtgaaataaaagctttgactag

SEQ ID NO: 154 - DNA, 473 bp, Homo sapiens
  misc_feature (1)...(473): n=a,t,g or c
atttctgaatctagcaaatcctccttttacccgttgaatgttttgacnngccctgactctaccagcgcccataaatgatctctagaaggactgttagtaccaatctgtttttcaactttgaagctaaaaaccctgatatggtaatattatggtgcatagcagaggtctcggaaaaaaaatatttctgttcactttactttcaggttaaaaatgtttctaacacgcttgcaacttcccttatggcattaatcttgttgagggagagagacagaatcctggactctccaaagtatttaactgaaagtagggcctgctctgacagggcccatgtcccacaaggctgcttggccctcagtgggtgcttggctgtnctggatgatatgtttgatcngtattggataagggaccaatgacagcnaaagcaaaaattggctttaaagctntggtgttactttttctnaagttgtntaaat

SEQ ID NO: 155 - DNA, 366 bp, Homo sapiens
agcaatagaagcctcgcccccgcccttccctttcgcaggattcgccgagtctgtagcctccccgatccaagttcctagacctcatggctgtcccctcccaccagtcacctccactgcacaactcgggcgggggtgtgacacctctcccccacccccgactccgtggtttccgtatcgtcaacccttcagccgccgacccgggaggtctggcctacactggtcttccccttcccatcaactctttctgcttgacaatgtagcaacccagggccccccacccacggtcctcccctttttcctctccctgacaataaagtctgaatttgttctgccaaaaaaaaaaaaaaaaaaaaaataaaaaataat

SEQ ID NO: 156 - DNA, 1666 bp, Homo sapiens
atttgctttctctttttcctttcttccggatgagaggctaagccataatagaaagaatggagaattattgattgaccgtctttattctgtgggctctgattctccaatgggaataccaagggatggttttccatactggaacccaaaggtaaagacactcaaggacagacatttttggcagagcatagatgaaaatggcaagttccctggctttccttctgctcaactttcatgtctccctcctcttggtccagctgctcactccttgctcagctcagttttctgtgcttggaccctctgggcccatcctggccatggtgggtgaagacgctgatctgccctgtcacctgttcccgaccatgagtgcagagaccatggagctgaagtgggtaagttccagcctaaggcaggtggtgaacgtgtatgcagatggaaaggaagtggaagacaggcagagtgcaccgtatcgagggagaacttcgattctgcgggatggcatcactgcagggaaggctgctctccgaatacacaacgtcacagcctctgacagtggaaagtacttgtgttatttccaagatggtgacttctatgaaaaagccctggtggagctgaaggttgcagcactgggttctaatcttcacgtcgaagtgaagggttatgaggatggagggatccatctggagtgcaggtccaccggctggtacccccaaccccaaatacagtggagcaacgccaagggagagaacatcccagctgtggaagcacctgtggttgcagatggagtgggcctatatgaagtagcagcatctgtgatcatgagaggcggctccggggagggtgtatcctgcatcatcagaaattccctcctcggcctggaaaagacagccagcatttccatcgcagaccccttcttcaggagcgcccagccctggatcgcagccctggcagggaccctgcctatcttgctgctgcttctcgccggagccagttacttcttgtggagacaacagaaggaaataactgctctgtccagtgagatagaaagtgagcaagagatgaaagaaatgggatatgctgcaacagagcgggaaataagcctaagagagagcctccaggaggaactcaagaggaaaaaatccagtacttgactcgtggagaggagtcttcgtccgataccaataagtcagcctgatgctctaatggaaaaatggccctcttcaagcctggtgaggaaatgcttcagatgaggctccaccttgttaaataaattggatgtatggaaaaatagactgcagaaaaggggaactcatttagctcacgagtggtcgagtgaagattgaaaattaacctctgagggccagcacagcagctcatgcctgtaatcctagcactttggaaggctgaggagggcggatcacaaggtcaggagatcaagaccatcctggctaacacggtgaaaccccgtctctactaaaaatacaaaaaataaaaaattagccgggcatggtgacgggcacctgtagtcccagctactcgggaggctgaggcaggagaatggcatgaacccggaaggcagagcttgcagtgagccgagatcacgccactgcactccagcctgggagacagagcgagactctgtctcaagaaaaaaaaaaaaaaaaaaaaa

SEQ ID NO: 157 - DNA, 485 bp, Homo sapiens
  misc_feature (1)...(485): n=a,t,g or c
tctgaggactcagctggaaccaacgggcacagttggcaacaccatcatgacatcacaacctgttcccaatgagaccatcatagtgctcccatcaaatgtcataaacttctcccaagcagagaaacccgaacccaccaaccaggggcaggatagcctgaagaaacatctacacgcagaaatcaaagttattgggactatccagatcttgtgtggcatgatggtattgagcttggggatcattttggcatctgcttccttctctccaaattttacccaagtgacttctacactgttgaactctgcttacccattcataggaccctttttttttatcatctctnggctctctatcaatcgccacagagaaaaggttgaccaagcttttggtgcatagcagcctggttggaagcattctggagtgctctgtctggccctgggtggggtttcattatcctggtctggtcaaacagggcaccttaaatcct

SEQ ID NO: 158 - DNA, 1284 bp, Homo sapiens
cagcgggtcggggaccgaaagtcgcttcggggcgggcgccagtctccggcccagccccgggccggcatccaggcgccgccgctccggcccagccccggcccggcccctatgatgaagagggcgtccactggagttcttgctgtcgacatctttgacaagttcaacttcacgggagccagagtcccatggttcgacgccattcatgaagcattccccagggagctggagtcctccatctccttcccagccaacttcttcaaaccacctgaagaaaaagaaggccccctggtaaggccagccagccggaggaccaccccgcagaccacacgcccagggcctggcaccgagggggaggccccgatcagcaggtgaaagcgacaccctgatgacactggctagttcaccttcactctggtcatcgtttactgtaccccggggcagctcccgcctgagccctatgaccccaaccgccgcagcctctggctgcctcactggcccatcattaatacgtcgatggtgagcgcactggtgtacagcgagggggctccacttccgagacccctggagaggcccgtcctggtggagttcaccctgctggagatggagaagcgaaccaagcctgtctgtgtgttctggaaccattccctggcgtaaatgtgatgccgggagttctgcatcttcataccaagagcagtgatgaccttttagctggaatggccagaggggtaacggtgactaatggtgttaaagggaaggaaagctcctgcccatctgcagcaccttcggcatctgcccctgccatgaccactgtggagaacaaatccaagattagcacagggcaccaactggacagaggcctccggtcagcctcactctgactgcaaccccctctcactggacagcatcacctggacacagagcctcacctagtctgtgtcccatggaccacaactttgctttggacagtgacaccaagaatactcacccctttacttagccagaccacaggcagccacctggacacaaacatctctccagagtcagcctccacacagactccacagcagaactcccagggaggcactggggcatggcttcagagcaccaggcaggctccgcgtgcctagcacccgctcagccagggcagcctgcagcggagcttggagccagcagcttctcatctcttggcctcgggaaatgtagctggagtcatcatttagcagagcacggtgtccctgggttggccacccagcttagttttaaaataaaataatgtaatcttgg

SEQ ID NO: 159 - DNA, 1284 bp, Homo sapiens; identical to SEQ ID NO: 158

SEQ ID NO: 160 - DNA, 275 bp, Homo sapiens
ttgcacttctgcaaagatgtttaatgcacttagattacagagaggaagagggggcaagaaggaaacgacatctaagtgagtcacccaaaaattcttacaaaagtcccaggctggctgcagcccaggaaccgagtcgccactgacattaaaaactaatataaaattttacaaaaatctgcttgtcgcagcattcaggtacttgtacaaaaggaggggtctccctacagggctcctgacttgtaacaagggacccaaggcacctcacctgggcatgg

SEQ ID NO: 161 - DNA, 430 bp, Homo sapiens
  misc_feature (1)...(430): n=a,t,g or c
tatgtgcagaaagagactcatccgctgaatacacagcactgttaatcctacagtcttctgtccccacagagtctgctagatcttcctcttctgagtcatcctcttcttcctcctctggtgctgacgaactggaggtgggccctttgcaggttttcaggtggcgggtgagatggtatttggttagataagcctttgtacatttttcacagacataatcccgttttccttcatgagaattgagatgcttctttaagtgatttgttctcaagaacangcttatcacacttgggacacttgatctggcgttcttgagttgtggatgagcacgtgctgcttgaggtcctgcctccgcataaacaacttgtcacagtaatcacacttaagattcttctccccagtgtggataaccatgtgggactccaggtgagcc

SEQ ID NO: 162 - DNA, 429 bp, Homo sapiens
ttaggttttgttatcaaggttgtactggcctcaaaaactgaattggaaaagttccatcttttttcttctagaaaagtttataaaagcctggtattatttcttaaatatttggaataacttcagtgaagccatctgttcctagagttttctttctaagcaagtttttgaatactccactcaggtattgtttgcagttgtgacaaggcacaaccaatctctagtatgaccttgtttccagggcttttactgatggcatgttcaccaacccactggcacttcctaagttctaatcatttctcctttgtactgcaaaatgcaaaacaaaacaaaaatcctacttattatcttctcaaattagcttttcaggctcctgcccctatgcagcatgaggacatctgggaaatttcttggaggaattatatgtgtttg

SEQ ID NO: 163 - DNA, 326 bp, Homo sapiens
cttgcagctccagctcaaaggaaaacaaaaactgggtttgaatcctcgctctaccactaggctgcgtgactagcactaggctgcgtgactaggggaatgtcacttagcacctaggagccttggtttcatcacattgcaagggtggtgtgagaatcaagtgataaaatgttaagtgccaaccaggcacaatgtctgggtgcaaatggttgcatgacaatagaggtttctttacattatgatgactactcagccttttaagtgacaaagcatcttttaggtggagaccatgtatttctagtgatcaattcaaattagtacgactttcc

SEQ ID NO: 164 - DNA, 376 bp, Homo sapiens
tttttttttttttttttttttttttttaacagatactattttattatttacaaaatacatggtgatcataagagaacattttacaaattacaaatgggaaaagtacagggaaaagtagagacaaatgggttaaataacaaggtaaccatttgtaatgagtctgtttagaataaaatagttcttcacaaaagttagacaaggccatgagtaagtatatcactgtataaaaaatatcagtgacgtcaaaatatacctgtaccaaaaagtagaacagcaatggtagtgcatctaaatgtgtcctaaattaaattacagcacatacagtttcagtgttccacaatacaaccattgctctgaggcagcaatctgtgagact

SEQ ID NO: 165 - DNA, 292 bp, Homo sapiens
aggttcaactcaaatgagtttatttattaggaacttttgaaacactgaggttgaacagagaatgggaactagacagatcatttcagcatagatggttactttccctcttgctacagactctgcaggaaatgtcaattactgctttctttctccattatgttcaatcctttccaaggcagtcagagagctctctcccttcccattaagagaggatcttctccggtagcctttgaactgggaagtggctttagtatttgcaagtgtagatatacaaaagctcttcctcctctta

SEQ ID NO: 166 - DNA, 198 bp, Homo sapiens
ttttttttttttttttttttttttctagaatccgctttattatggcacctggtgggtctggtgggatctgagggaggaagaggctgcagtcttgctgggcagcccctcggtcagtccagcagcccctcaggccatgctgctgctcagctgcatggcaaagtcctgcacatgctccttcagagtctggcgggcatctgc

SEQ ID NO: 167 - DNA, 418 bp, Homo sapiens
gaaatgtaagtatacagattttaatttatttttaagaataattgtatattttaaaaacaggacacgtactgtatgagtaaacagcgtggctaacaccaagtccacactggtaagcttttgagaaccatttacactatgttgacagtagtactgctgcaggcagacagcggaagaataaataatagtgcttcaagaagagtagtgattgagaggataggtaaagagggcgcctcatcgtggaagctagagcaggaacacctccccagtagtgacatgtgcaaagttccagatctccacgacaaagacagctcaacccactggaacaaacagactcccaatgtggctggcaactgcgggggtagaagaactcaggcaaagtaggcacaggaatgggggagatgagagccaagggacaaac

SEQ ID NO: 168 - DNA, 435 bp, Homo sapiens
tttttttctctggtataatgtttatttaaatagtaatcttaaaaaggctttatacaaatcatataaacacagtttgacattgttgtttattttttacattgaagaatcacagtaaaagctctcaagttcccgtgatctggctcagcagtgaatggtcgaatacctctaactgcaaaccctgaaaaagttaacctgctatgtgacaggttaactctttcccttgttttcttgtcattcatgcttattccttggaccctcatccctgtcaactcccctgccccaccaaagacagaaagcaaccctgtggccctgttgaccacctagtccgggagagtgtggaggtaatgtgtcattcagtacaaggcaaaaaggagatcaatactggcagtggggtttcccaaagggaatgactcaaggagatgggtcagctagcct

SEQ ID NO: 169 - DNA, 569 bp, Homo sapiens
ttttttgcaagatttaattcttcctttaatataaataaggcagcatgaaacaccaagagccccactgctttctgctttagaagcagctttggtgcagaaaagattcccgtttccccaccgagttctgttgtctctgtacacacaagaagccagaagatatttttttttcagtgaactttctcctggaagcaaaggagaagctatgggagatccaggcatggttttggcttctggaggctgttttttggttactggggtctcttcaaagcaaaacgggatcaggatgaagagggggaaaggcatgggccataaataaataaggaaatttgccccgattctacaaatgcatctgatggaatgaggagggtcaggctgtgagggattgggggtagctccaggctgctgttagggacacacttgagctggttcattccctggagtgccccgcaactgcgtctagggagaggcaggcccaagcacatgttcagtctaattccagctcacactggaaggcttcctataggtttggttgccctgatcacagccgagctgccccaccaggaattaac

SEQ ID NO: 170 - DNA, 257 bp, Homo sapiens
tttattttggaaaatgttaaaatttattaataatagttaacatcacatagttaattaaactagttatgtattgtacataatgacaacatcttcactagactgagtgctcaaggatttgagatgattcgctattcatcacaccccgaagattgagatccactgtatttacacaaagcaaagccatgtcagcaagggactgtcaacctgattctgagaacataaacattcaaaatttattttccagtgttcctttttgg

SEQ ID NO: 171 - DNA, 272 bp, Homo sapiens
ttttactggttcaaacatttgcttttattgcgttatatacattctgcagctgtagaatcagaatctgggggaagccaactgagaccccgaagcccagcaggagtccatctgaggtacagaacctgtgcttctgccatgttcctggggcaggggcattccatttccccctgatgctttttcttcctgaagagaagtccaacagactgccagcccaggtctgaaatgcaaggtgggactcctgaacacagtcggggggatggggcagaggcaaa

SEQ ID NO: 172 - DNA, 451 bp, Homo sapiens
ttttttcacgtgtaagatttttattcaaatttgatttacattccaaaagaaattataaaatgtattcacttgtttataaaaaaaatttgtggggggacaaaactttaattcaaattataaaacatgataaattttcagattaaaattgggcaagttgcttggagtaacaagtttttaaatcaccattttccacctccacaccaaggataaccttctaattaatgatcagccatgttgtaataggatagcactgagacttgaggaaacagaaaaactgaagagctcttccaagccccgaccaggaacatttttatgccttctcatagtggcgaacagcaaccacatcaccaaaagtaagggtcataaccattttgccatccttaatttctcttacaaaatttgtttctttgccatcccatttctgtatgtgaacaagtttgtctccatccag

SEQ ID NO: 173 - DNA, 416 bp, Homo sapiens
tagtactcaaacaactttatttcactagccatgagcaaaaagttgaccggctcctggggattttccatcctgccctctccctgctggtggctcccatgatttggaaataacctcatgttccacttggcagtgcctggctttgtgcacccacatggttttggcctgggtcccagtgaaaatggtcctcacctggctggggaacatggttctgagaggccccttgatctgccctggggacatgtgtggccatgctaagggccctgccgaacttcacgtgactggccacctctgccagggtgcaggcagctcctagcatggagacatccttcatggaagtgagctttcccacccacctccatacccacatttctcagaaacagagttaacagggaaccaagagtcaagaagccacaggg

SEQ ID NO: 174 - DNA, 367 bp, Homo sapiens
ctgaggttgcttttattccaagacctctgtgagctccgcccagataccattggcgcctgcttgtgtccccaggggacctacacacaacagcaccagcaccatgagggcgctctcgacccacacaagccctggtccccgtcagtcaatgtgactgagtccgccattgaggccagtctggctggccccaagtggtccctctgagtccccaactccctggccagcaaggagtgaagctccatgccccttggtccacgcctctagagtctgagcatatcctgcagcctcgatctcaggaggcaacgcatgcagcccccctgcactcagaaagggggcttctccagtcgtggtcttcttctctgtccacaag

SEQ ID NO: 175 - DNA, 410 bp, Homo sapiens
agaatctcgcactgttgcccaggctggaatgcagtagcgtgatcttggctcaccacagcctctgcctactgggttcgagcgattctcctgcctcattgggcactgaatttgtggatattcattatattattagtataagtaaaataaaaataagcaaaacagggtcatgcttggatcaatgaggatactatgttatgagccaaggaaaaactgaggagccagagacctcaagaagccaaacatacaatgtataaacaacaaaacagagtaagaagctattttaaaatacagtaaaacaaaagaggattggtttctcaaatgtaaaaccacacgctttctgagggccttgaccctaaggacactagtagttacagaaagctttccctttctacccctaggagtttcaatgg

SEQ ID NO: 176 - DNA, 352 bp, Homo sapiens
  misc_feature (1)...(352): n=a,t,g or c
ttttttttctgcctataaagtgaatgacttgtggtgcaatcttacaaagtctcaatctgtgtattctgcaataaaggcattatattatcactattgcatttgtgatacattctaccttaccctttatgtgacaattctatactgttttaactgtcaaattgtaagtaaaagtgtgaattcgtgaccaaaaattttccacaccagcaacttaagganctacagcaatatgtttaggaaaactgcgatcccaaacaaaaaatctatactagggtgaggacagggatgacattgactttaattccaataggacttcactaccacatgacgtccattactagtggctcacttttcc

SEQ ID NO: 177 - DNA, 397 bp, Homo sapiens
ggagactggatatcatctttaattaataatgccacagcccaatgtcttttttgttgctgtagcaaattgtgattgtgtgtgcgtgtgtgagtgtgtgtgtgtgtgtgttcctgaacagatgaagggccagcagagactcccaagcaggtctcagccaacaactctgttgagcagcaactggaagatagtctccatagaggcacagaggccagacttctgcctcctatggcattgatcctctctcctgggccacctttcgtgcattgagggcaaggctgaggcctgtaccagcccagattaaaggacttctaagcacaggtcagcctccagttcccagtactcactggcctctgaccagagggatgccctgggtagagtatagacttccaggcagagg

SEQ ID NO: 178 - DNA, 329 bp, Homo sapiens
  misc_feature (1)...(329): n=a,t,g or c
tttttttgggatgcagcactttctttattgcccatccagggaacagccaagccagctccatctgcattctggctgcagcgtgtacattaggggactcaggggccacagtgtgggaccgtgcacactggcaaggcactggcggatntgggcaggccagttggacatggatagatgagaatgacaactcacagatgtcctagcttctgctggcccagctgccancactgncatcacccttttgcccagcatgtgtgcattgtcacccaaaacatcttgaaacttgccattagtgaggcattcaacaaagaagtaagctaagtgagtaggaa

SEQ ID NO: 179 - DNA, 187 bp, Homo sapiens
tttttgagacatgaaaacgtatgcatttttattaaccagatttttaaaaaaggacaaaggcacatgtatcagggtgccgggggtgcatggtgtacatctgatttcataagcaatgtcagtctcctctaaactggcatcctgcgcttgacaggtaggcagaacaaacgggacgctggcaccggaacct

SEQ ID NO: 180 - DNA, 522 bp, Homo sapiens
ttttcaatataacatgtctattttattttaaaaaacaaaacccaaaccacctgaccccttccccaggaggctcttgacgaaactctagggaagggcctggctccagccaagcaggggacagtcagaagatgtcaacatggatgccaggctggtgggctccgcattctccaagccccccatccaccccctttgctcctcggtgctacaggcactgccgggtttgaggggacaggcagggcaggactgtgggcatgcagagcctcctggcagccagggagggctcgcgcccccctgcatctggcgaggcaggcagctgtgtgcgcagtgatggagctaggaggaggaaacatgcgcagacaccccgtgttcccgcttccccacgtggccaggagagtgttcaaacacgaacaaggatggctgggcactcagggcccagcctccaacccaggagaggaagaggggggtccgccctcctggttcttttgttcgtccttagatggatggtgttctcggtgccactcg

SEQ ID NO: 181 - DNA, 198 bp, Homo sapiens
tttttttttttttttttttttttttttttctcattgtaacactcgtttttatataaatattcgcaagtcatgttacagaagaagccccaccagggaaaaaagtcaacgttagggttttgttagattgacccctgccttctaggttgggccccagctggagcgcctgctgctttgggaaggctggggttgctgccgtga

SEQ ID NO: 182 - DNA, 323 bp, Homo sapiens
ttttttttttttttggactcgcagactttaagcaaacacgtgtggggccgctcccgcctggcgttcaagttgtccgcgtcggtcaccagcggggccaggtagtccgagtgccggatcccgaaactccagccgcggggcttccggtgctgatccacgttgtaggccgcgggccctggcttccgagtgttgtcttgggggagcgaagtccgcgccagaatcgtgaactggggggcccgggacttgtagacccctggactcacgacctgataggcgcaggggcccggggtcttgctgaggtcctcgaagaaactgccagccgctct

SEQ ID NO: 183 - DNA, 392 bp, Homo sapiens
tttttttttttttttttttttttttttttaaatttggagaggagactttatttcttataaagggttaaaggcctgcaaggtggccatcccacaggccaggaagtacaatctctggcaaagaccagagacaggcacttcaaaggaggagcaggggtaggaacttgatgctgaataggttggctaaacatacatattcaacaggttacaggaggagctatgaataattatgaaggtcatcctgactcatgcttattgaacaaacatgcatgtaacatacaacccatgttcactttgaggtagagacttaactctttttgtagttgttattgtttgttttttgtttttcgcgacggagtcttactctgtcacccagactggagtgcagtggcgcc

SEQ ID NO: 184 - DNA, 414 bp, Homo sapiens
tttctgttttttttcctgtttgatagctgtcagttatagtgattggtatttaatacaaaaaaaaccaaagatatgaaaattgttctatattttaatctgcaaattgctccattaggcagatttaattatttgtggatttacttatggtgcttccagatatcttgtacctcttaatgtgaccatcagaaaacttgactgagaaacatttgtactatacaaaatacaaaatgctttcagtatattattgcaagtgcttcttaaaaacatatagtattgttaaatgtgtactttttaatgttgtcttgtttaaattggaaaattaaccaaatgttatccatttaaacatgctttataacatattaaatgtgagtgcttaataagtacttttaatgatactggtacgggtgttggaac

SEQ ID NO: 185 - DNA, 385 bp, Homo sapiens
ttaatcctaattgtatttctctattcctgaagagttctgtaacatgatgtgttgattggttgtgttaatgttggtccctggaataagattctcatcatctccttcaatcaagcagtcccactgatcaaaatctttatgaagtcctaaatgcttttgtaagaatgctaatgaagctttgttgctaaggatcaatagctgcatttgaatctatgtctccctttaatttgaggcatgtgtccaattattttgccagttgcaaaaggtgaagtcaggcaaaattctgggtgggactggaacccctggattggtaatcatctttctttctttatcgggtgaggtaggccatttttttcatttttatggatataggccggggtattggggg

SEQ ID NO: 186 - DNA, 454 bp, Homo sapiens
  misc_feature (1)...(454): n=a,t,g or c
tctgaatacttgcttatttattcttatacaattaatgatcccctcttaagaactaccattgcagtggctgctcccacagagccccctccaggcccttcccccaccaccctgggtatccctagcacctgtaggacagcatcgttgaaacattaggggtgctggggtctgagagggtatcctgctgggacaatgcccgcggaacctcctgcctgtctttagacatggacaaggaagatgcactgatctgttttgaggagcacatccgagctttggagagggaagaggaggaggaacgggagcgggcccggcttcgggaagcgacgccaacaacgcaagaatcgggaggccttccaggtatctttgctgtcctttctaagatcagagctcaagtctgccctaagagcacaanctcttcaaccattccctggccccttctggatanggtggcttgttt

SEQ ID NO: 187 - DNA, 449 bp, Homo sapiens
  misc_feature (1)...(449): n=a,t,g or c
ttttttttttaatctggtaattttatttaatatttaccattcagcagcaaccaacatgaacatgtgggctaacagaatcncttaaaatgttctgctatgtagctgcttcagaaatacacacacatgataaattcaagataaattcaactggctcactgccaaaattttttttaaaaaatggctccaagagcaaataacactgatttataatgtgcccaagcactacgtcaacaaatctattaaattacacaggaaaaggaaatcaaggaagctttgttatcttatgcatgtcatcttatttaaatggaaggttttacttctttaaagcaacagaaatatggagcttcacatatatatgtatatatatatgaatgtggttacaaacacgaaggtttattcaaaagcaaaagctagttcaaaaaatttctgactgcaaaacttggcaagat

SEQ ID NO: 188 - DNA, 447 bp, Homo sapiens
  misc_feature (1)...(447): n=a,t,g or c
gccataaggggcataattgagaaaactggcagaatgtgagtaaggtgaaagcactgatttcataaacttgatggttacgctgtgattatctaagagagtgtccttgtcttagaaaatgtatgctcagttatttaggggtaatgggagatcatgtctacagctactgttaattggttccagaaaaacagactgtggtgtgtgtgtgtgtagaaagagaaagagaaagagagaagggtagcagagggggagagagaaaggtcctgataaagcaaaccgtaaaaattttaacaaatacaaagtaaatgaaatgtatttggaaattagtattatttgtattaagtttgaatgattttatatttgtgtaagtttgtattattcntgcaacttttcngtaagtttgnaattatttccaagttttcccaaattaaatggacnaatataaagggg

SEQ ID NO: 189 - DNA, 145 bp, Homo sapiens
taacagcttttatagttagcagccattctttattttctggatagccaggttttatcacgcttctagtcaggatgcctcctattccttctaaaaattacggtctgactagtgagcaaagtcttgaatttattcaaaagctcctaaa

SEQ ID NO: 190 - DNA, 270 bp, Homo sapiens
  misc_feature (1)...(270): n=a,t,g or c
cttcctcattcattagncaagattacagactaggatatagcaacctattattcaagaacagcttttaaaggtagctgcttcagactggcacttcgggaaaactttgaaagtagacttctttttttttttaatgcttattttaactatagattggtgataacgattcaaccccagagatccagctaactgttggcacagaaatccttaacgctactctcaagcaaataagatcttgtaaggggaaactcctgcaaaatataccttgtgaac

SEQ ID NO: 191 - DNA, 370 bp, Homo sapiens
catctttcagtgcactttaatcgaaattccatcatcagaagagttctcgtagcatacaatgtcaggatgggcatgtcgacttggtcctacaaatggaatatccacagatttgcacttcaaacatgtatgaaaaataaaatatataatatttagctttataaatttccccacttagtcactttatctttaaaataaattactactcccgtccaatacagtgagtagcttggagtcactcagacaatctctagccaaatgatctctgttttcttgaggagttctgtagggaaatacttgatgaagacagtccagtgcttacaagaatcaacatgaatttaaaacgagcacactcttcacagtggggcggaac

SEQ ID NO: 192 - DNA, 496 bp, Homo sapiens
  misc_feature (1)...(496): n=a,t,g or c
tttttttttttttttccagttctttcttttttattctgcagttttctatcagtgtcgggtcccccactccagccagtggtgtggggaagggaagacatctctagggacacgactacagaccaggcagtgagcctagcaaccatacatcgaaggtgtcgccagcctcagtgccggtggncgtctgcaccaggaatagctaaagccgacgacatctagccacctcgagcgccagggaagacgctccggtanaaaccgcggcctcaggcggactcccgctccagctccgcgctgctggtggcatttccggggacccaaagtgggtggccttcgtcttgcccccgcagtggcagcacacggtccacaggtacttgagcgtccgccagagcaagatgatgaagaggccccgaagaaagtcaccatggaaggaggccaggaaagcccaccaaatgcgttngncccggntgtcgaanggaacctccatggtcancgggatgat

SEQ ID NO: 193 - DNA, 394 bp, Homo sapiens
  misc_feature (1)...(394): n=a,t,g or c
tttttactgtgtcccaagcttctttatttaagaaaaaagtgatacatgatgtgggattaaaatcaagagcatcattgaacttcaccttccctccaaccagttgccccaaactcccctgcccccaccctttgtgttcccaattccttccttagtgaatgaagaacttaatcccaaaaaccctggcacaaactccaggttttctttccctagctcctcccctccccctgtcccccattcctagaagggcaggcacctcagtttgaatgcatgggagagcccagagtggtgacagagacagggggaaaggcttccccctcagggaaagggaccgaggagtacagtggcagtngaagtgagggctcccatagcctggggtaccaaaatggggccctgg

SEQ ID NO: 194 - DNA, 210 bp, Homo sapiens
  misc_feature (1)...(210): n=a,t,g or c
gcattttcactgaagcatttattatgcaaaanaggaaggctttagcatgccagtataaattaaaacagtagaaaaaaagcagagcagagagcgttttccatccatggcctgtgccctgtaatgacgcagcagtatcctagtacattgacgggtttttcctgtcctgccactgtccgntgggcagttataggtcccaagtgttgggtcttc

SEQ ID NO: 195 - DNA, 493 bp, Homo sapiens
tttttttttttttttcccgtggcactcaatcttttattttcttaaactgtacacaaacgtacaatactttaacagcaagtctatgggaaaattgtttggttttaaattattatgaaacagaatctatggggagctttattaaataaacataaagatgaggatttaaggatacacacctgcattctatcatagtcatttttactctaccttctgggtgtgtaaggatggaaaagacacatcaaaccgaataaacaaaatccattcataccctgaaacgttggcaggccactcaagggactgctcagaacgtccacctcatctcagatggcctcaccgtctaataaaattaaaactgatctgttggcctctttggttccaaaattatgtataatacatttaactgtattctcttttttttttttttgctgctataaaataactttttttcaatggcagttctgactaatctgcacttaatcagtgcaacataaaa

SEQ ID NO: 196 - DNA, 282 bp, Homo sapiens
tttaacaaaacacttttatttggtccactggagcctgagtcggaaaccactgtggagaatcctatcataaaggaatggggactgacagttgataaaacagcttctgtgtcacaagagctggccgtatttacatatttaggggttaaaaatattcacagttcagggtacagggaggccaaaggggagtggggaatgtttctccaggtgtaaaagctctggaagcccctaggagggtacgggtggtggtggtggtggggggggtggttgggaggggagtgaagg

SEQ ID NO: 197 - DNA, 411 bp, Homo sapiens
tttaagaaaattcagtaattctccattgaacatctactacatatccaactctgtgctaaggtatgctgtggaaaagtcaaggaagaatgtatgagacacatccctgcactcccaggagtttataatttcggaggagatgcaaacgtggacccattttaatgtaacaaaagatacactgtgttaacagccaaaatggaggcctgtacagagtactggggcaacctggaaatctggttttaggatacactgcattcaaagcaatttgcttttttcttcaacatttcttgagcacctgttatgtgcaaagcaaggagtcaggtgcctttctggaaaacgaaataaacacggcactgtctctgtttacaactgcccatttaacaaacatttcttgaacatctactacatgtgatg

SEQ ID NO: 198 - DNA, 394 bp, Homo sapiens
gctatgagtcatttatttgagatcatttatcaaaaggcacttaccgagtaccaatttttgaggcaatgtaataatgttattttatttttacatgagctagttcttatacaaccatcaattctgaatcttgtttagtttgatgttaagtaatatacacaatttatattgttcatgtatgaaatttgtctatttttccatagctttttctgatttcctcattaggatttcaaatatcttttggaaaatactcaaagccaaaaggtggtcagaatttcacattctaaattgactttttattttatttttttttttgacagagtctcactctgtcacccaggctggagtgtaatggcacgaactcagctcacttcaatctccgcctccagggttcaag

SEQ ID NO: 199 - DNA, 452 bp, Homo sapiens
  misc_feature (1)...(452): n=a,t,g or c
ttttttttagatagatagatagatagataggatagactctcactccttcacccaagctagagtgaaatggcatgatcttggctcaccgcagcctcctggtttcaagaggttctcttgcctcagcctcccaagtaactgggattacaggnacccaccaccacccccagctagtttttgtatttttagtagagatgaggtctcgaactcctgacctcaagtgatccacccgcctaggcctcccaaaatgttgggattacaggcgtgaggcaccgcanccaacctaacagaggaaacacttcaaatgcacatcctcacatttctagtctacgtagctgggaaaaaaaggacatttttaatatgctaatgtgggaggtcacctagttaccctaagggagaaangcaaggcaaggncccactgncacagcaagtttccccttgggaaggcccanggg

SEQ ID NO: 200 - DNA, 406 bp, Homo sapiens
  misc_feature (1)...(406): n=a,t,g or c
ttggtacgtacacacccacactcacacccacccacacacacccatacacccattcctgatgcactgagcaaatacagtactgagaagggacctgatgagatacaggaggctggtgtggagggctcgggtcactggtgactcgccaaaaaaaaaatatattgactatgaggcaagggatacaccaagacaacagccttccatcactgtttgcacagagttctcttcttaacacctccctgcaacacttctcaagggtgctcttgaatgggacccagctatccggggaacagctgctgcctttacggacatggggccaacagtgggcagggagtttntaggaagggggagagggcttggggactttaggtttttcccctttacaggccaggcccctttnagggggcac

SEQ ID NO: 201 - DNA, 508 bp, Homo sapiens
  misc_feature (1)...(508): n=a,t,g or c
actaagttataaaaaaaaaaaccccatcaccaaagacacctgtgcacaagtgtctgtcccttctgtcaccaacctagggcactacacccttcccaacatcatgaccctactgccaggtctacagattttgtaacactcaaagtgtcctgcattaaaaagcacgtgtctatttcctacgtgaaggggccaagggagccctggtggccaaatatcttcacccaggactgggagggcggcctcgatgacaaccaaggggtggatgctgacactccatcccaggacaggtggctgggtaggattccctgagcccctgacagctgggacatagggccaggacttgtacccgaggcagctgggcagtgggcagtcacattccagtaggccctgaggaatccccaaataagtcacgctgggaggaaagtgagacnccaaaacagaaacatgccctgccatccgggcgtggctcantctgtcttcgcgcagggctggttggcatggtgctacactc

SEQ ID NO: 202 - DNA, 456 bp, Homo sapiens
  misc_feature (1)...(456): n=a,t,g or c
cagccaagagttctctttattccctttgatcctcccccaaggtgagggcttaggcagctgtagaaccccaggaaagaacggaatccaggcaatctgtttagagaccccccactccaaatttatccttttcctttccttcccctaagatgtttccagggccctctggtgcccacactgtcctcttccttccanttgggggtggggaaatccttcctgcgaggtcagggcatttntntacaaagtggcctgaatgaggccagggcctgagaaggagccaccagntgggaggaaaggggntccaagncttgcttttaacacccctggcaaaacccccaccctnccaagatttttcacaaaagggtnaggaaattcagggtacggnaaccattcaatgggncaactttggaaaatngcatttttcctcagggnctttggcagtttccccggaggtttttt

SEQ ID NO: 203 - DNA, 316 bp, Homo sapiens
  misc_feature (1)...(316): n=a,t,g or c
anctttcagtgcactttaatcgaaattccatcatcagaagagttctcgtagcatacaatgtcaggatgggcatgtcgacttggtcctacaaatggaatatccacagatttgcacttcaaacatgtatgaaaaataaaatatataatatttagctttataaatttccccacttagtcactttatctttaaaataaattactactcccgtccaatacagtgagtagcttggagtcactcaggcaatctntngncaaatgatctctgntttcttgaggngntctgtagggnaatacttgatgaaggcagtcccgtgctt

SEQ ID NO: 204 - DNA, 435 bp, Homo sapiens
  misc_feature (1)...(435): n=a,t,g or c
tttttttttttgaaaggttaaaaataacattcttttaataagtttaaacttttagagaaaagagaaatatactgagaaagacccatataactgcttcaacaaagaaaacaacttcttcattatcttcatactttacttcatattacaaattttgtgctactgttagatgatatattaattttattttcattacataaattgaggaagaaatgcagaatcagattcaaatatattacaaggcatttaagggaggtgtgtcctgttgctgaacagtaaattatctgaaaatctacttttttnttttttggagatggtctcattctgtcacacagctggagtgcagtgtcgtgatctcggctcactgcagcctccacctcctgggttcaagcaattctcatgccttagcctcccaagtagctgaggcaagagaaacac

SEQ ID NO: 205 - DNA, 439 bp, Homo sapiens
  misc_feature (1)...(439): n=a,t,g or c
gttaaatgaaattgtattttgcccacggtcgcttctgtttgatccctggggacagaggggagcaagggaggggagtggcagggggaggcccaggtgtggggctggagggggtactggcggcacgggaggcagtaggcttgggcaggggaggagtgcgctgcgcctcaggaggcaaaggtgccccagcctgggcaggccctggaccagcccaagctgagcagcgccgcccctgggctggctctcagagcttgggctaacgtggagcccgccacgtcgcttggcactcagaggcccctgcttcttgttggctcacgtaggccacgctcaacacgttagcctgttgccacaccctttcgaaggcccgggttaggaagggcagaagggctggtctgggctctttggtggacccctggctggttgctgccttgccctcctncca

SEQ ID NO: 206 - DNA, 581 bp, Homo sapiens
  misc_feature (1)...(581): n=a,t,g or c
tataagtggctaaatcttccagctaaaaagtttttatttccagtagaagtagtacttgtattttttccttgactggatttggatacaggatccattgcaacatatttgatttggaaacctccagctgtcactgaagcatcacttagaaacttcaaggtcatcgacatttcctgtactgatgatgtcatctggaagctcatctccacagtatcttcccacaaagccatggacatcatcgtaactgtcatatatttcaacataatcagccaagcaacctgggtcatcttcaaggtcaaaatctaaaaaactcaggtgaatacgctgaccatacttgagtctaatgtgccagtagcagatttggttatcttcgtactcatttgggaagcctggagatttaaaaatttgctttggatctggtaaagacgccaccacactcctttgcgtgtgggttgtagcaataggcatcccatctttcactcctattgagacggattccataatcaataatgccagtttttcccaaatccacagttggggcccnggcttcacaatgggggnatccaactctggccctagccatg

SEQ ID NO: 207 - DNA, 2588 bp, Homo sapiens
gctttctcctagggactgtgaggggcgcttctgactttggacttgagcactgcctgggacctgtgctgagagagcgctagcatgtctcagtggaatcaagtccaacagttagaaatcaagtttttggagcaggtggatcaattctatgatgacaactttcccatggaaattcggcatctgttggcccaatggattgaaaatcaagactgggaggcagcttctaacaatgaaaccatggcaacgattcttcttcaaaacttgttaatacaactggatgaacagttaggtcgtgtttccaaagagaaaaacctactcttgatacacaatctaaaaagaattaggaaggtccttcagggaaaatttcatggaaatccaatgcatgtagctgtggttatttcaaactgtttaagggaagagaggagaatattggctgcagccaacatgcctgtccaggggcctctagagaaatccttacaaagttcttcagtttcagaaagacagaggaatgtggagcacaaagtggctgccattaaaaacagtgtgcagatgacagaacaagataccaaatacttagaagatctgcaagacgaatttgactacaggtataaaacaattcagacaatggatcagagtgacaagaatagtgccatggtgaatcaggaagttttgacactgcaggaaatgcttaacagcctcgatttcaagagaaaggaggctctcagtaaaatgacccaaatcatccatgagacagacctgttaatgaacaccatgctcatagaagagctgcaagactggaagcggcggcagcaaatcgcctgcatcgggggtccactccacaatgggctcgaccagcttcagaactgctttacactattggcagaaagtcttttccaactgagaaggcaattggagaaactagaggagcaatctaccaaaatgacatatgaaggtgatcccattccaatgcaaagaactcacatgctagaaagagtcaccttcttgatctacaaccttttcaagaactcatttgtggttgagcgacagccatgtatgccaacccaccctcagaggccgttggtacttaaaaccctaattcagttcactgtaaaactaaggctactaataaaattgccagaactaaactatcaggtaaaggttaaggcatcaattgacaagaatgtttcaactctaagcaaccgaagatttgtactttgtggaactaatgtcaaagccatgtctattgaagaatcttccaatgggagtctctcagtagaatttcgacatttgcaaccaaaggaaatgaagtccagtgctggaggtaaaggaaatgagggctgtcacatggtgactgaagaacttcattccataacgtttgaaacacagatctgcctctatggcctgaccatagatttggagaccagctcattgcctgtggtgatgatttccaatgtcagtcagttacctaatgcttgggcatccatcatttggtacaacgtgtcaaccaacgattcccagaacttggttttctttaataatcctccacctgccacattgagtcaactactggaggtgatgagctggcagttttcatcgtacgttggtcgtggtcttaactcagatcaactccatatgctggcagagaagcttacagtccaatctagctacagtgatggtcacctcacctgggccaagttctgcaaggaacatttacctggtaaatcatttaccttttggacatggcttgaagcaatattggatctaattaagaaacacattcttcccctttggattgatgggtatgtcatgggctttgttagcaaagagaaggaacggctgttgctaaaggataaaatgcctggcacctttttattaagattcagtgaaagccatctcggaggaataactttcacctgggtggaccattctgaaagtggggaagtgagattccactctgtagaaccctacaataaaggccggttgtctgctctgccattcgctgacatcctgcgagactacaaagttattatggctgaaaacattcctgaaaaccctctgaagtacctatatcctgacattcccaaagacaaagccttcggtaaacactacagctctcagccttgcgaagtttcaagaccaacagaaaggggtgacaaaggttatgttccttctgtttttatccccatctcaacaatccgaagtgattcaacagagccacattctccatcagaccttcttcccatgtctccaagtgtgtatgcggtgttgagagaaaacctgagtcccacaacaattgaaactgcaatgaagtctccttattctgctgaatgacaggataaactctgacgcaccaagaaaggaagcaaatgaaaaagtttaaagactgttctttgcccaataaccacattttatttcttcagctttgtaaataccaggttctaggaaatgtttgacatctgaagctctcttcacactcccgtggcactcctcaattgggagtgttgtgactgaaatgcttgaaaccaaagcttcagataaacttgcaagataagacaactttaagaaaccagtgttaataacaatattaacag

SEQ ID NO: 208 - DNA, 1414 bp, Homo sapiens
gaattcgcactgctctgagaatttgtgagcagcccctaacaggctgttacttcactacaactgacgatatgatcatcttaatttacttatttctcttgctatgggaagacactcaaggatggggattcaaggatggaatttttcataactccatatggcttgaacgagcagccggtgtgtaccacagagaagcacggtctggcaaatacaagctcacctacgcagaagctaaggcggtgtgtgaatttgaaggcggccatctcgcaacttacaagcagctagaggcagccagaaaaattggatttcatgtctgtgctgctggatggatggctaagggcagagttggataccccattgtgaagccagggcccaactgatgatttggaaaaactggcattattgattatggaatccgtctcaataggagtgaaagatgggatgcctattgctacaacccacacgcaaaggagtgtggtggcgtctttacagatccaaagcgaatttttaaatctccaggcttcccaaatgagtacgaagataaccaaatctgctactggcacattagactcaagtatggtcagcgtattcacctgagttttttagattttgaccttgaagatgacccaggttgcttggctgattatgttgaaatatatgacagttacgatgatgtccatggctttgtgggaagatactgtggagatgagcttccagatgacatcatcagtacaggaaatgtcatgaccttgaagtttctaagtgatgcttcagtgacagctggaggtttccaaatcaaatatgttgcaatggatcctgtatccaaatccagtcaaggaaaaaatacaagtactacttctactggaaataaaaactttttagctggaagatttagccacttataaaaaaaaaaaaggatgatcaaaacacacagtgtttatgttggaatcttttggaactcctttgatctcactgttattattaacatttatttattatttttctaaatgtgaaagaaatacataatttagggaaaattggaaaatataggaaactttaaacgagaaaatgaaacctctcataatcccactgcatagaaataacaagcgttaacattttcatatttttttctttcagtcatttttgtatttgtggtatatgtatatatgtacctatatgtatttgcatttgaaattttggaatcctgctctatgtacagttttgtattatactttttaaatcttgaactttatgaacattttctgaaatcattgattattctacaaaaacatgattttaaacagctgtaaaatattctatgatatgaatgttttatgcattatttaagcctgtctctattgttggaatttcaggtcattttcataaatattgttgcaataaatatccttcggaattc

SEQ ID NO: 209 - DNA, 3946 bp, Homo sapiens
accgctccggagcgggaggggaggcttcgcggaacgctctcggcgccaggactcgcgtgcaaagcccaggcccgggcggccagaccaagagggaagaagcacagaattcctcaactcccagtgtgcccatgagtaagagcaaatgctccgtgggactcatgtcttccgtggtggccccggctaaggagcccaatgccgtgggcccgaaggaggtggagctcatccttgtcaaggagcagaacggagtgcagctcaccagctccaccctcaccaacccgcggcagagccccgtggaggcccaggatcgggagacctggggcaagaagatcgactttctcctgtccgtcattggctttgctgtggacctggccaacgtctggcggttcccctacctgtgctacaaaaatggtggcggtgccttcctggtcccctacctgctcttcatggtcattgctgggatgccacttttctacatggagctggccctcggccagttcaacagggaaggggccgctggtgtctggaagatctgccccatactgaaaggtgtgggcttcacggtcatcctcatctcactgtatgtcggcttcttctacaacgtcatcatcgcctgggcgctgcactatctcttctcctccttcaccacggagctcccctggatccactgcaacaactcctggaacagccccaactgctcggatgcccatcctggtgactccagtggagacagctcgggcctcaacgacacttttgggaccacacctgctgccgagtactttgaacgtggcgtgctgcacctccaccagagccatggcatcgacgacctggggcctccgcggtggcagctcacagcctgcctggtgctggtcatcgtgctgctctacttcagcctctggaagggcgtgaagacctcagggaaggtggtatggatcacagccaccatgccatacgtggtcctcactgccctgctcctgcgtggggtcaccctccctggagccatagacggcatcagagcatacctgagcgttgacttctaccggctctgcgaggcgtctgtttggattgacgcggccacccaggtgtgcttctccctgggcgtggggttcggggtgctgatcgccttctccagctacaacaagttcaccaacaactgctacagggacgcgattgtcaccacctccatcaactccctgacgagcttctcctccggcttcgtcgtcttctccttcctggggtacatggcacagaagcacagtgtgcccatcggggacgtggccaaggacgggccagggctgatcttcatcatctacccggaagccatcgccacgctccctctgtcctcagcctgggccgtggtcttcttcatcatgctgctcaccctgggtatcgacagcgccatgggtggtatggagtcagtgatcaccgggctcatcgatgagttccagctgctgcacagacaccgtgagctcttcacgctcttcatcgtcctggcgaccttcctcctgtccctgttctgcgtcaccaacggtggcatctacgtcttcacgctcctggaccattttgcagccggcacgtccatcctctttggagtgctcatcgaagccatcggagtggcctggttctatggtgttgggcagttcagcgacgacatccagcagatgaccgggcagcggcccagcctgtactggcggctgtgctggaagctggtcagcccctgctttctcctgttcgtggtcgtggtcagcattgtgaccttcagacccccccactacggagcctacatcttccccgactgggccaacgcgctgggctgggtcatcgccacatcctccatggccatggtgcccatctatgcggcctacaagttctgcagcctgcctgggtcctttcgagagaaactggcctacgccattgcacccgagaaggaccgtgagctggtggacagaggggaggtgcgccagttcacgctccgccactggctcaaggtgtagagggagcagagacgaagaccccaggaagtcatcctgcaatgggagagacacgaacaaaccaaggaaatctaagtttcgagagaaaggagggcaacttctactcttcaacctctactgaaaacacaaacaacaaagcagaagactcctctcttctgactgtttacacctttccgtgccgggagcgcacctcgccgtgtcttgtgttgctgtaataacgacgtagatctgtgcagcgaggtccaccccgttgttgtccctgcagggcagaaaaacgtctaacttcatgctgtctgtgtgaggctccctccctccctgctccctgctcccggctctgaggctgccccaggggcactgtgttctcaggcggggatcacgatccttgtagacgcacctgctgagaatccccgtgctcacagtagcttcctagaccatttactttgcccatattaaaaagccaagtgtcctgcttggtttagctgtgcagaaggtgaaatggaggaaaccacaaattcatgcaaagtcctttcccgatgcgtggctcccagcagaggccgtaaattgagcgttcagttgacacattgcacacacagtctgttcagaggcattggaggatgggggtcctggtatgtctcaccaggaaattctgtttatgttcttgcagcagagagaaataaaactccttgaaaccagctcaggctactgccactcaggcagcctgtgggtccttgtggtgtagggaacggcctgagaggagcgtgtcctatccccggacgcatgcagggcccccacaggagcgtgtcctatccccggacgcatgcagggcccccacaggagcatgtcctatccctggacgcatgcagggcccccacaggagcgtgtactaccccagaacgcatgcagggcccccacaggagcgtgtactaccccaggacgcatgcagggcccccactggagcgtgtactaccccaggacgcatgcagggcccccacaggagcgtgtcctatccccggaccggacgcatgcagggcccccacaggagcgtgtactaccccaggacgcatgcagggcccccacaggagcgtgtactaccccaggatgcatgcagggcccccacaggagcgtgtactaccccaggacgcatgcagggcccccatgcaggcagcctgcagaccaacactctgcctggccttgagccgtgacctccaggaagggaccccactggaattttatttctctcaggtgcgtgccacatcaataacaacagtttttatgtttgcgaatggctttttaaaatcatatttacctgtgaatcaaaacaaattcaagaatgcagtatccgcgagcctgcttgctgatattgcagtttttgtttacaagaataattagcaatactgagtgaaggatgttggccaaaagctgctttccatggcacactgccctctgccactgacaggaaagtggatgccatagtttgaattcatgcctcaagtcggtgggcctgcctacgtgctgcccgagggcaggggccgtgcagggccagtcatggctgtcccctgcaagtggacgtgggctccagggactggagtgtaatgctcggtgggagccgtcagcctgtgaactgccaggcagctgcagttagcacagaggatggcttccccattgccttctggggagggacacagaggacggcttccccatcgccttctggccgctgcagtcagcacagagagcggcttccccattgccttctggggagggacacagaggacagtttccccatcgccttctggttgttgaagacagcacagagagcggcttccccatcgccttctggggaggggctccgtgtagcaacccaggtgttgtccgtgtctgttgaccaatctctattcagcatcgtgtgggtccctaagcacaataaaagacatccacaatggaaaaaaaaaaaggaattc

SEQ ID NO: 210 - DNA, 1468 bp, Homo sapiens
gacaccgtggggggtaggtttgatgccactcaggcatttgtcggggagctcagccagttcaacatatgggaccgcgtccttcgcgcacaagaaattgtcaacatcgccaactgctccacaaacatgccgggcaacatcatcccgtgggtggacaataacgtcgatgtgttcggaggggcctccaagtggcccgtggagacgtgtgaggaggctctccttgacttgtagccgccttctcctctgtccaggaggccgggatcaggctgttgccatggaagttcagggccatagactgccccacttaaactcttgtcagtctgggctcagggttcccagagctcattccccaggaatctctaagaccagggctggggcagtgtctgtcactggcttgtttgttccctaccaatattctgttgctgtttgaagtagtgccagggtcccctgggaagatgcccccaagacacctgccccaagtgggtggatatctgccttcctgctgcaagtggaggcaggtccagcagcccctcttcagagcccctgtaaatgctatcgcagcctgagtcctgccgccttccagttccttggtgtcccgtgcaccccttctgtctgtcccctttcatgctgtgcagccgtcccgctggagtggccatgtcccttgtgcattgagtgcatccccgctggtgactaagctcgcagcaagcgctacccccgatctgcaaaagggcctctccctttgtgttctatacattgtgaatcttcccgtctgaagaacgcccagcctgcccagacaaagccccgccttccccaaagcagaggggctgtctgtgtctccagaaaggggacatcggggggggaggggggctcagaaaggagaagggctgtgatctccggtcccttcccccatcatccttccttagactgatgctttgactgaatcatcactagctatggcattaaaaggcctctcttctcatctggtgccaaaggttccgttgcagctttttacaaccatccggtgtggtttggaggatttgttttttttttttcccaacagaaaagaacagccattagaagaaggctcccattttctgatgttccgccccactgtgaagagtgtgctcgttttaaattcatgttgattcttgtaagcactggactgtcttcatcaagtatttcccctacagaactcctcaagaaaaacagagatcatttggctagagattgtctgagtgactccaagctactcactgtattggacgggagtagtaatttattttaaagataaagtgactaagtggggaaatttataaagctaaatattatatattttatttttcatacatgtttgaagtgcaaatctgtggatattccatttgtaggaccaagtcgacatgcccatcctgacattgtatgctacgagaactcttctgatgatggaatttcgattaaagtgcactgaaagatg

SEQ ID NO: 211 - DNA, 1857 bp, Homo sapiens
gagccatgctcgcggcgatgggctctctggcggctgccctctgggcagtggtccatcctcggactctcctactgggcactgtcgcctttctgctcgctgctgactttctcaaaagacggcgcccaaagaactacccgccggggccctggcgcctgcccttccttggcaacttcttccttgtggacttcgagcagtcgcacctggaggttcagctgtttgtgaagaaatatgggaacctttttagcttggagcttggtgacatatctgcagttcttattactggcttgcccttaatcaaagaagcccttatccacatggaccaaaactttgggaaccggcccgtgacccctatgcgagaacatatctttaagaaaaatggattgattatgtcaagtggccaggcatggaaggagcaaagaaggttcactctgacagcactaaggaactttggtttaggaaagaagagcttagaggaacgcattcaggaggaggcccaacacctcactgaagcaataaaagaggagaacggacagccttttgaccctcatttcaagatcaacaatgcagtttccaatatcatttgctccatcaccttcggagaacgctttgagtaccaggatagttggtttcagcagctgctgaagttactagatgaagtcacatacttggaggcttcaaagacatgccagctctacaatgtctttccatggataatgaaattcctgcctggaccccaccaaactctcttcagcaactggaaaaaactgaaattgtttgtttctcatatgattgacaaacacagaaaggattggaatcctgcagaaacaagagactttattgatgcttaccttaaagaaatgtcaaagcacacaggcaatcctacttcaagtttccatgaagaaaacctcatctgcagcaccctggacctcttctttgccggaaccgagacaacttccacaactctgcgatgggctctgctttatatggccctctacccagaaatccaagaaaaagtacaagtcgagattgacagagtgattggccaggggcagcagccgagcacagccgcccgggagtccatgccctacaccaatgctgtcatccatgaggtgcagagaatgggcaacatcatcccccagaacgttcccagggaagtgacagttgataccactttggctgggtaccacctgcccaagggtaccatgatcctgaccaatttgacggcgctgcacagggaccccacagagtgggccacccctgacacattcaatccggaccattttctggagaatggacagtttaagaaaagggaagcctttatgcctttctcaataggaaagcgggcatgcctcggagaacagttggccaggactgagctgtttattttcttcacttcccttatgcaaaaatttaccttcaggcccccaaacaatgagaagctgagcctgaagtttagaatgggtatcaccatttccccagtcagtcaccgcctctgcgctgttcctcaggtgtaatattgttaagaaagaaaggggcaaggaaagcaagaagacatggcacgtgttctgaaaccactggtgtctgctcagatgtgttgggacaaaatgaaagtgactttcaagaaagatcagaggaatttgactcagagaaaactagatccaaatcccagctctactgtctctcccgaattagccttgggaaaatcatttatatgctaaataatttacctttttatctaggagatgaaaagaggataatgtttccttccataaagaaagttcttgtaagaatcaaaagaaatggtgagctttaagtggtttgtaaaccataaaacacatcataaaagttctatctata

SEQ ID NO: 212 - DNA, 2655 bp, Homo sapiens
cggcgtgcgcggacgggcagccagcagcggaggcgcggcgcagcacacccggggaccatgggctccatgttccggagcgaggaggtggccctggtccagctctttctgcccacagcggctgcctacacctgcgtgagtcggctgggcgagctgggcctcgtggagttcagagacctcaacgcctcggtgagcgccttccagagacgctttgtggttgatgtttggcgctgtgaggagctggagaagaccttcaccttcctgcaggaggaggtgcggcgggctgggctggtcctgcccccgccaaaggggaggctgccggcacccccaccccgggacctgctgcgcatccaggaggagacggagcgcctggcccaggagctgcgggatgtgcggggcaaccagcaggccctgcgggcccagctgcaccagctgcagctccacgccgccgtgctacgccagggccatgaacctcagctggcagccgcccacacagatggggcctcagagaggacgcccctgctccaggcccccggggggccgcaccaggacctgagggtcaactttgtggcaggtgccgtggagccccacaaggcccctgccctagagcgcctgctctggagggcctgccgcggcttcctcattgccagcttcagggagctggagcagccgctggagcaccccgtgacgggcgagccagccacgtggatgaccttcctcatctcctactggggtgagcagatcggacagaagatccgcaagatcacggactgcttccactgccacgtcttcccgtttctgcagcaggaggaggcccgcctcggggccctgcagcagctgcaacagcagagccaggagctgcaggaggtcctcggggagacagagcggttcctgagccaggtgctaggccgggtgctgcagctgctgccgccagggcaggtgcaggtccacaagatgaaggccgtgtacctggccctgaaccagtgcagcgtgagcaccacgcacaagtgcctcattgccgaggcctggtgctctgtgcgagacctgcccgccctgcaggaggccctgcgggacagctcgatggaggagggagtgagtgccgtggctcaccgcatcccctgccgggacatgccccccacactcatccgcaccaaccgcttcacggccagcttccagggcatcgtggatcgctacggcgtgggccgctaccaggaggtcaaccccgctccctacaccatcatcaccttccccttcctgtttgctgtgatgttcggggatgtgggccacgggctgctcatgttcctcttcgccctggccatggtccttgcggagaaccgaccggctgtgaaagccgcgcagaacgagatctggcagactttcttcaggggccgctacctgctcctgcttatgggcctgttctccatctacaccggcttcatctacaacgagtgcttcagtcgcgccaccagcatcttcccctcgggctggagtgtggccgccatggccaaccagtctggctggagtgatgcattcctggcccagcacacgatgcttaccctggatcccaacgtcaccggtgtcttcctgggaccctacccctttggcatcgatcctatttggagcctggctgccaaccacttgagcttcctcaactccttcaagatgaagatgtccgtcatcctgggcgtcgtgcacatggcctttggggtggtcctcggagtcttcaaccacgtgcactttggccagaggcaccggctgctgctggagacgctgccggagctcaccttcctgctgggactcttcggttacctcgtgttcctagtcatctacaagtggctgtgtgtctgggctgccagggccgcctcgcccagcatcctcatccacttcatcaacatgttcctcttctcccacagccccagcaacaggctgctctacccccggcaggaggtggtccaggccacgctggtggtcctggccttggccatggtgcccatcctgctgcttggcacacccctgcacctgctgcaccgccaccgccgccgcctgcggaggaggcccgctgaccgacaggaggaaaacaaggccgggttgctggacctgcctgacgcatctgtgaatggctggagctccgatgaggaaaaggcagggggcctggatgatgaagaggaggccgagctcgtcccctccgaggtgctcatgcaccaggccatccacaccatcgagttctgcctgggctgcgtctccaacaccgcctcctacctgcgcctgtgggccctgagcctggcccacgcccagctgtccgaggttctgtgggccatggtgatgcgcataggcctgggcctgggccgggaggtgggcgtggcggctgtggtgctggtccccatctttgccgcctttgccgtgatgaccgtggctatcctgctggtgatggagggactctcagccttcctgcacgccctgcggctgcactgggtggaattccagaacaagttctactcaggcacgggctacaagctgagtcccttcaccttcgctgccacagatgactagggcccactgcaggtcctgccagacctccttcctgacctctgaggcaggagaggaataaagacggtccgccctggcaaaaaaaaaaaaaaaaaaaaaaaaaaaaaaaaa

SEQ ID NO: 213 - DNA, 1552 bp, Homo sapiens
gcccgtacacaccgtgtgctgggacaccccacagtcagccgcatggctcccctgtgccccagcccctggctccctctgttgatcccggcccctgctccaggcctcactgtgcaactgctgctgtcactgctgcttctgatgcctgtccatccccagaggttgccccggatgcaggaggattcccccttgggaggaggctcttctggggaagatgacccactgggcgaggaggatctgcccagtgaagaggattcacccagagaggaggatccacccggagaggaggatctacctggagaggaggatctacctggagaggaggatctacctgaagttaagcctaaatcagaagaagagggctccctgaagttagaggatctacctactgttgaggctcctggagatcctcaagaaccccagaataatgcccacagggacaaagaaggggatgaccagagtcattggcgctatggaggcgacccgccctggccccgggtgtccccagcctgcgcgggccgcttccagtccccggtggatatccgcccccagctcgccgccttctgcccggccctgcgccccctggaactcctgggcttccagctcccgccgctcccagaactgcgcctgcgcaacaatggccacagtgtgcaactgaccctgcctcctgggctagagatggctctgggtcccgggcgggagtaccgggctctgcagctgcatctgcactggggggctgcaggtcgtccgggctcggagcacactgtggaaggccaccgtttccctgccgagatccacgtggttcacctcagcaccgcctttgccagagttgacgaggccttggggcgcccgggaggcctggccgtgttggccgcctttctggaggagggcccggaagaaaacagtgcctatgagcagttgctgtctcgcttggaagaaatcgctgaggaaggctcagagactcaggtcccaggactggacatatctgcactcctgccctctgacttcagccgctacttccaatatgaggggtctctgactacaccgccctgtgcccagggtgtcatctggactgtgtttaaccagacagtgatgctgagtgctaagcagctccacaccctctctgacaccctgtggggacctggtgactctcggctacagctgaacttccgagcgacgcagcctttgaatgggcgagtgattgaggcctccttccctgctggagtggacagcagtcctcgggctgctgagccagtccagctgaattcctgcctggctgctggtgacatcctagccctggtttttggcctcctttttgctgtcaccagcgtcgcgttccttgtgcagatgagaaggcagcacagaaggggaaccaaagggggtgtgagctaccgcccagcagaggtagccgagactggagcctagaggctggatcttggagaatgtgagaagccagccagaggcatctgagggggagccggtaactgtcctgtcctgctcattatgccacttccttttaactgccaagaaattttttaaaataaatatttataat

SEQ ID NO: 214 - DNA, 921 bp, Homo sapiens
ccctcggacggccccggaggatgctgctgagccccggcactgcctggctgcgagcacatgatggcgatacgggagctcaaagtgtgccttctcggggacactggggttgggaaatcaagcatcgtgtgtcgatttgtccaggatcactttgaccacaacatcagccctactattggggcatcttttatgaccaaaactgtgccttgtggaaatgaacttcacaagttcctcatctgggacactgctggtcaggaacggtttcattcattggctcccatgtactatcgaggctcagctgcagctgttatcgtgtatgatattaccaagcaggattcattttataccttgaagaaatgggtcaaggagctgaaagaacatggtccagaaaacattgtaatggccatcgctggaaacaagtgcgacctctcagatattagggaggttcccctgaaggatgctaaggaatacgctgaatccataggtgccatcgtggttgagacaagtgcaaaaaatgctattaatatcgaagagctctttcaaggaatcagccgccagatcccacccttggacccccatgaaaatggaaacaatggaacaatcaaagttgagaagccaaccatgcaagccagccgccggtgctgttgacccaagggcgtggtccacggtacttgaagaagccagagcccacatcctgtgcactgctgaaggaccctacgctcggtggcctggcacctcactttgagaagagtgagcacactggctttgcatcctggaaggcctgcagggggcggggcaggaaatgtacctgaaaaggattttagaaaaccctgggaaacccaccacaccaccacaaaatggcctttagtgtatgaaatgcacatggaggggatgtagttgcatttttgctaaaaaaaaaaaaaa

SEQ ID NO: 215 - DNA, 25000 bp, Homo sapiens
gaattcatgcatgcccctggcccctcactctccccacaaggaatgtgcatgtgtgcaaagggtaggcctggatgccatttctacaaacagttgactaaagcagtccagagcagggatctttctttgggtcattgttatgtccttattgaccagaataatgcctggcacacagtaggcactcaataaatacttgttgaatggaggaatctgcaaagctgctcagtcttcagacagcagcaagcagcaaggaagagaatcatgatgtaaccaagagcaggtgctggaggagctagggagtgagtggggatctttaaggacagcaggccctctgatctgtctgagctgtgaggcaaagcctagttagggaggtgagttctatctgcaatgagagggggcatgggtggagaacagtaacaccaaacaccaacagaccagagcctcccaaacccgaaaggagagaaacaaagtgtgattgatttcccaaatgcagaaaagactacccaagtccccagccaaggaaggaggctggcctgtggtgaagacactggctttgaaatggctcaacatcgtcccaagcaccctttgtgcatcttaattgccctgggaaacatgggaggggtggcagtttggagcttggaaagctggaaggtggggacgaaaggagtttttgcccctcatcgccaatccttgaggttcctacagggaacctcagacaacagctgtcttaggggtttccttccagctccaagcagctgtattatctatagctttgagagggtctgtctctgtcaatggggctgattcctcagcacctggcagggcctggggggggactgccagagtctgttctgccgggcatgttagtagcacagactactgggataacctcagcaactgtatacctttagcactgcagagctgcggtgttgtcagacacagcccttgcagttcgtggtctacccccacttgcctgcaccccccttatagctgctcaatgtcctcagactgtaccttagtgccttggttaccaagcaacccccacagaggcctcctcctggattttcccttccctgctatgcccacccccaccttcaaaaatgtacctgctgcacccatcccccaggcctgcctcactccttccaagctgacagctaatcagatgggactaactccatgcgcggaagagctgtgcttgggaagaagggggagatttcacaccaaatcgtgcagtggttgcctagacacggagccagtcaagcttgcatgttttgttgctagaagagcatggcatcggtggtgttctgtgctcgcaggctgggcccagctccctttcctcccctcctttgtggctgttcctcaggcctgcagaggggaagatttttcctgtcctgttactctgcctcacttgccagaacactagtcgcctccagctctggataaagctgaggctgggtgggccagacaacagctgtcttaggggtctccttccagctccaagtagttgtattatctatagctctgagagggtctgtctctggggctcaggcctttagtacctgtggggcagagcaggaacgtgagtcaggcaaaccgctccaaactaggaccaatgcagctgggtcctgctctcctgcgcatagggggaccccacatagggggaccccacatctttggaatcccagcccacctttccaggctaccctccacaggccgggctccactcccatctgctgaggtttcccaccttgaatcctgctgccccgattagctgtataaccttaaagaatgcactgtccctctccattaaaatgaagtgcttggatggattgctaaaggcctgtctggctcggaggcttggtgcctcaacacattgcctgctggtccaaggaaatcagtgcctgagccagagtccccatctctaagctccatggttattgttcttgccacctggctaggaaatgtccttccagctgccccagtctagctgcctcaccctggggccatgcccccaactctgtcctacccttctctgctgctgacactcgccccttcccagcttccagttggatacaggacctgggccaggagagcagggaggacactgtggaaaatgcggccaggccatcaggggcctcgcagcaggggactggaagggggagcagtgtccagggccagaagtgctgcgggagagccaggacattggctgcctgtggtcttggtggtcgtggtcagttccctctcctgccagctgtggaatgtgaggcctggcctgggagatatttttgctgcactttgagccaccccgccccctggaactcagaccctgcacagtccatgccataacaatgacgaccacttccaattgtttcctagctcgagagagaggcggggaggggagcactgtttgggaagggggggagcctcggggggatgcttctagtgacaacagccctttctaaatccggctagggactgggtgccgttgggggtgggggtgcctgctgccccatatatacagcccctgagaccaggtctggctccacagctctgtcctgctctgtgtctttccctgctgctctcaggtaggagcgggagctggaggctttactctgggataaggggggctccaggcttaggaaagggattcctcttggaatagcaagcttcatgcaggacttcatgcagagtaccaggtccagtcactgggcacacatgtgcaggtctaaacatgggcgtatgtgccacaggagttcctaggggaagatatctgcatctgagcatatgggaccaatatgcattacagggtgtgtgtgtgtgtgtgtgtgtgtgtgtgtggacaagcctgcatagtctgaatgtgagaaagggtatgtacctcactgactgatacagaaatatcaagtgggagatgtgggtgtatgatcacgtctgtgaacgaggaggttcctttgcagggagggagaaagaatggtggagaaggattctaggaagtgtgtaatgccttcatgtgattctgtgaggcctggaatgtctctgcagaaggaactcacaggcacgggggtgtaggatgttccaggtctttgtgtactgaagaacacgcagatgtgatctacttacgtggcacacatcctgaaatgtgcacatttgctgttgaggcatatatggcaccctggggttggggtgcggattgaggtatgggaaggaagcctgtcttcatgtgagaggcatgcccaagcagcaggcatgagtgttcataacgagggcttgtggagggtgtttggctatgtgatgggtgtgtctgtgagaggaagcccacaagtgtcttctctctgagaatgtccacaaagagtacaacaaaatggggacaggatggaaaaagaagtctctttagagtcatcagacttgcattcaagccttggctctcccacttgttgtcatgggctcttggccaagcaacccatttaacctcgatttcctcatctgtcaaatggggtgaagactgagtaggagaaagtgcattgaagtgcttttagactggaaagtgccgaacaaatgtgaccattagttgtctctcagatggctcaaagaaaggtaaccactagatgggtaccaggcaggggtgggaccatctcgcaggagtgaagaggattagggctcaaggttgagttgacaccaggaagctgttagaactagttcttgaggaaaaagggaatagggtttgaaaaacaagaaggatgggaccagagaagctgaccaccctttccaccttgttttggaagaggggtagctgaagaacagagccagggagaagcaggaaggtgggactggtcaggttgggcacagcctgccctgacacagcctcttccctctctccaggtcccctgcaggccttggccttttcctcatctgtagacacacttgagtagcccaggtaagaaaagctgaagctagagtgttgaaaatctagtaagactgggcattagagctccccaaagccagcctatggaactctagtttctgccatgtgctggagagaatatcttggctatcaagagctactacctgtgaccagggggccagggatagatgaggtcagagatggaaatagttagatttcttcctcctacagggagctcagaatgctcttccttcccctaggagagccccagcttgaacaatagtttgttgttccttttaccctggcaggtttgctaggctgctcctctggttaaggggaacctcaaagaggaagggactcactggtaactcctcttgactcttgagcatggtgctaggttttggggctcccactgaaggggagagcccagggagggaagggaagaaatgggcagatgggagggcagccagcttctgctccactccaggcacagccatgggagattcggagatggcagtctttggggctgccgccccctacctgcgcaagtcagagaaggagcggctagaagcgcagaccaggccttttgacctcaagaaggatgtcttcgtgcctgatgacaaacaggagtttgtcaaggccaagatcgtgtctcgagagggtggcaaagtcactgccgagaccgagtatggcaaggtgggtgtcaggctgatgtgagagtccaccctgccacctgtacacctgggtgacagagaggggtacacccatgccccatgcccatgcagacctgaggatggtcccattctccttccctttggggaagaatccagaccctccaaagagccctctccttcccaatatcccttctgtcttccctgtgagatcctggttccttctctcttgagcactattgccctgtcactcaccaactcctaaccctcttgaggaaggaggggaagcccaggctgacaggagggcttgggtgggggctcttgcagacagtgaccgtgaaggaggaccaggtgatgcagcagaacccacccaagttcgacaaaatcgaggacatggccatgctgaccttcctgcatgagcccgcggtgctctacaacctcaaggagcgctacggctcctggatgatctacgtgagtcctgcccctggccctacgttgggatctctgttcttgctccatccatgtccaccccaggagccaagagtgtcttctgtttgtgtctaggcagggttacactctaactcgtcccaacatccttggttcaattccaacactctggggactggcattactcagattgagtgcatgcagaggttttccttctcttctttctctcctgggatctttctctaactcccaaaatcaccagccctcccccttcgcaactggcaagtcactgctccttttctaatccccagacctactcgggcctcttctgtgtcaccgtcaacccttacaagtggctgccggtgtacactcctgaggtggtggctgcctaccggggcaagaagaggagcgaggccccgccccacatcttctccatctccgacaacgcctatcagtacatgctgacaggtgagaggccctggaaggtcttcctgaagggaactgggataggccgggagggagagggagaaggaagggagaagccccacgagagcatcctgtgcagctcctaacctttcccccccaccctctccccacagacagagaaaaccagtccatcctgatcacgtgagttagctgctactgtattccctttcagaatctccctgatcccagcctccagccccatcaggtgtcccaggccccgaggcatagactcagcctctttccccgcaacctcgtgcccatctccttcttctctgaccattaccctgacccctctctttgctctccctcttcctttctgctttccatccccttcatgtttttcctctcccacctccttcacccactctccaactcatcacgcgtttatcagagctcattatgcagcttcacctctgcattttctttcccttcagaaacatttcccattcttccagccctaccaacttttcccaaaacagcccaggcccatctcccctgtttactttgcccagccaagcacaggctcagcctgcccaaaccagtgccttctggtggctaccttcctggtgccagccctgacctctgtgcatcagaagacagttgtggattttgggtgtagataacctggcagcttcttgcccagggctcctctctcgggtaggcccaggcattctctcctgatttgaggcttgtcggtctccagtagtattgttcactgcccaataagcccctgtcttcacagcggagaatccggagcagggaagacagtcaacaccaagagggtcatccagtactttgctgttattgcagccattggggaccgcagcaagaaggaccagagcccgggcaaggtagcctgctgccctccaaggtcctgtaccgcagaaagggagggagaagagctctcacctgcctccttcttggcctctgcagggcaccctggaggaccagatcatccaggccaaccctgctctggaggcctttggcaatgccaagaccgtccggaacgacaactcctcccgctttgtgagtggtccctgaccttggccttgggacttggactggtggaggaatggtctcagatatgagccttcccccaactcatcaccactctcttccatctctaggggaaattcattcgaattcattttggggcaacaggaaagttggcatctgcagacatagagacctgtgagtgccatgaatctgctaggctcagcctaagctcacccttgctctagaccatctggtcttgacctctctctctctcccctccctccctctgtttttctcctctttaagtctctgtctgtaggtgtctctgtcttcaggtctacatatctgtctctctctgagacttcctctgcatctttctccatttctgtctctgcatggctaggtgtctttctctgggatttctctctgagatcattttaatctcttcctcgggtctcgttctatctctcgtgtgtagactctctttgtgtgtcctctgtgtctcacaactctagatgtctctctccgtgcgtctctctcctctccctctctcgtcgctctttgtcgtctgctgcatcattatcattaatttcctgtgccaaccctagacttttctttctctccttcttctccccacctgttcagcagatcttctggaaaaatccagagttattttccagctgaaagcagagagagattatcacattttctaccaaatcctgtctaacaaaaagcctgagctgctgggtgagtcagagccaccgactgagaccaactatctcatgcactgtccttgcttgctgactcagctgcatgcctggttcatggcactgctggatcaattcagtggatgtgggccaagccaagccctgtcctgtgctcttcctcaggcatgtgctgtggcgagcagcctccatgagagccgggggcttgtgtcccaccctaaccatgttttttcccctagacatgctgctgatcaccaacaacccctacgattatgcattcatctcccaaggagagaccaccgtggcctccattgatgacgctgaggagctcatggccactgatgtgagtgtgtgaggacccagccagggggtgggaggattggcagtgaggggcaaacaggggtccaaaagcagagctaagacgctggccattggttgtttaaagtggtaatggacctcctgagagccagaatgttgccctgtgatcagggtgtactggggaatggatgaggtgagacaggactggccagtatctggtgttctatcaaaccaggaagagctgaaacgcatgagacagagagacacacaagccaagaaacaagcatcaccgagggagcaggacgaggagggaaggccatgcagacggcatggggctggagggggctgttaggtgaacagatgcagacaggtatggaaggccaggcaggaagcaagtgtagggccaggaagcataagtgggtaactcagaaaagctgtggccactgacactggggctgcggccaactgacgtctgctctgctcttgcatcttacatcctttgttttggagttccctgcatcttacatggttttgttttggagctccccactgggtatgggagtctcagaaccccacaggattaaggatacagttttctctccaacttacaagggatctcacttacccatcatacttcttttttggggtccgccaatatgggggcctcctacagaacgcttttgatgtgctgggcttcacttcagaggagaaaaactccatgtataagctgacaggcgccatcatgcactttggaaacatgaagttcaagctgaagcagcgggaggagcaggcggaaccggacggcactgaaggtgggaggcagggattcttgggggcagctgtcaagtcatggagggccatgtctgctcagcagtcatctctcttctcttttttcttttttttttgagatggagtcttgctcttgctctgttgcccaggctggagcgcagtggcacgatcttggctcactgccacctccacatcctgggttcaagtgattctcctgcctcagcctcccggagtagctggaattacaggcatgcaccaccatgcctggctaatttttgtatttttagtagagatggggtttcatcatgttggccaggttggtctcaaactcctgacctcaagtgatccgcctgccttggcctcccaaagtgctgggattacaggcatgaaccacacacctggccagcagtcatctcttaccaactttgctcttgccttttccttccagaggctgacaagtctgcctacctcatggggctgaactcagccgacctgctcaaggggctgtgccaccctcgggtgaaagtgggcaatgagtacgtcaccaaggggcagaatgtccagcaggtgggtccatcttcagatgataatgggtgggcagggtagggagactggcatggtgggatgagagttttcaagttcactcttcccaacaaccctgctcaatatgggctctctcttcacgccttgcaggtgatatatgccactggggcactggccaaggcagtgtatgagaggatgttcaactggatggtgacgcgcatcaatgccaccctggagaccaagcagccacgccagtacttcataggagtcctggacatcgctggcttcgagatcttcgatgtgagttgggacccctgggagtgggagaacaatcactcactcgctcccacattcaacagctatttcttagagccagctgtggaccagacatgggaaggcagtggggactgtgtggtgacagaggcagtcatttactctgtcttcaggggaagccctccttcactgccttgacatggaggggaccagccacgcctgctgggctcaggcacagtggacggcacagccccaatggccactcacacccactttctgactgctcccacccctcatgccccctgcagttcaacagctttgagcagctctgcatcaacttcaccaacgagaagctgcagcagttcttcaaccaccacatgtttgtgctggagcaggaggagtacaagaaggagggcatcgagtggacattcattgactttggcatggacctgcaggcctgcattgacctcatcgagaaggtgcctctttggccttaccacctgaattccatcctcgacaccaacaagaacacatagacaaaatagcagcccctctcccttctggggaatataaaaatagaaggggctgaaggatccgagcccttggttcagagcctatgttgtgctgagcaccaggacagggtggcacagggacagctgatttccaggggcttgagagtggacacatggaggatgggcactgcatgatgacctccacactgcatgtttattgggcctggtatgcatccaaggatcaggaagtgtgagggtggtgtaggggatcataagagtgcacctattttcaaccctagcatctcaggcatctgggtcgtggagtggtgtgtacagcatcgatagaatccatattcccagactttcacaaaggtccttctgtcatcagacaaaatcctccaccttgaaccggttccagtcagtagataactgtactcagagctgagcctactaccttaacacccaacatggcacctccacgagcaagtatattgaccatagagcagaatccatgtcacctgtgtgaaggacactcagtgatgctctctcctgcttcctcagcccatgggcatcatgtccatcctggaagaggagtgcatgttccccaaggccaccgacatgaccttcaaggccaagctgtttgacaaccacctgggcaaatccgccaacttccagaagccacgcaatatcaaggggaagcctgaagcccacttctccctgatccactatgccggcatcgtggactacaacatcattggctggctgcagaagaacaaggatcctctcaatgagactgtcgtgggcttgtatcagaagtcttccctcaagctgctcagcaccctgtttgccaactatgctggggctgatgcgcgtaaagtagggactgaggctcccggtacaggaggagcagggattctgccaaggttctgagccaggtcaattgctacaccccaccacttcaatgtcaggttgtacccaaggtttacagactcagtgggatggaactgggtgaagaaactgaggcagccacattgaaggccctcacccaggggcccaaatgccagcaaggatgtaaagaggggctgtgattctttactcacaccctacctccccacactgatgcttcttttgttgactctccttcctgcagctattgagaagggcaaaggcaaggccaagaaaggctcgtcctttcagactgtgtcagctctgcacagggtgagtgggacacagccccagccaacttggctccccatctgcccaaccccaccccagccccacccttccctgccttgttcatcccctactcctcccgttccctgtctccttgtgcattcggaccattttcactctgtcttctcttcccgtcatctcctggcctcttcacttatttacttcccatctcccttctctcctctttcccttctgtctcccaccctctctccttatccctgtctcgccccagggccccttcatctctgtgaccttctgaattctctcatctctcttttccttccttcttctcctctcttcttcctgcatctctttctggcattttctttacttttctctattgcactttttggccacaggaaaatctgaacaagctgatgaccaacttgcgctccacccatccccactttgtacgcttgtatcatcctaatgagacaaagtctccaggtgaggccacaaactcaggccaacccactgctgggcatacaccgccctgggaacagggacctcctaggacatctccctacctaccaccacagtggtttccaaaccacaattcttctcctcccatcccgcatgaggcctcccagggtacctccctctcagcgctaccttgcacttgcagtgtgtaatgagggtgatgtgtaaggcactctgatggacattacctcatcagtggccctacaaccccttggatagctggttgtccaagacaagaatcttagttcaactttaaatttacctgcaggaaccacttaatcccccaatgagacatattcaaattgttaatccatttttggctaattaggagcagaggctcagggacctgggttcaagacctggctctgttcttgatcagcttagtgaacttgggccagtcccataaccctctgggcttaatttactcatctagaacattggatatatctgttctggctaccacctatgataataggtactgggaatcatataaaaaaggaatgtgaaagccttttagttaaaaatgtggctagaagaaaatgaaacaaatgattattactaactgacttgctaagattacaagctaatcagtgacaaagccaggatcagaacccagaacttcagtccagttctcacagactcctcctacttccttcttgccacaggggtgatggacaaccccctggtcatgcaccagctgcgctgcaatggtgtgctggagggcatccgcatctgcaggaaaggcttccccaaccgcatcctctacggggacttccggcagaggtgggtatgagggtgcaccagaagctcatagaacagggggagccaggctgccctgatgggaatgggatctgcaggtgaccctgaattcctatggggcagagcagactcactgcagagcatgggtgactctggacacttccctcctcaggtatcgcatcctgaacccagcggccatccctgagggacagttcattgatagcaggaagggggcagagaagctgctcagctccctggacattgatcacaaccagtacaagtttggccacaccaaggtgaggaaaggagactaattaattaaaggaaagacatctcttttccattgactcctctgatgcttttcctgttgtaatcatcttagcaaaatctcttacctgtatgctacccctcccagtggaacatctagcaccactcccctcatcccagctccagctgccattgacctctcctgcaatccttttctaggatgttacccttcctaaggtaatcccacatctctttcctcgtaccctccatgtcatgccacaaacttgcctgcaggtgttcttcaaggccgggctgctggggctgctggaggaaatgagggacgagaggctgagccgcatcatcacgcgtatccaggcccagtcccgaggtgtgctcgccagaatggagtacaaaaagctgctggaacgtaggtgagagatctcaagaggaggtttcccgcttctctgaggcccaggctggttcaggggcagtgtcaggaaaaaaagctcagcagatcttcaaacacagagacctgcaggaggggctcatatgaacacactgcagtcacagggtcagaggcctcaggaagggtgggagggatgaaggaaatgggatattcccaaggtttcaggacctcaggtaggaaggaggcaggaggctcagcactcctttcaatgggcccctgcagagactccctgctggtaatccagtggaacattcgggccttcatgggggtcaagaattggccctggatgaagctctacttcaagatcaagccgctgctgaagagtgcagaaagagagaaggagatggcctccatgaaggaggagttcacagccctcaaagaggcgctagagaagtccgaggctcgccgcaaggagctggaggagaagatggtgtccctgctgcaggagaagaatgacctgcagctccaagtgcaggcggtgaggctcctgggctactgttggctcttccaccctgctctgccttcacttcccacagaccctgcacctccctgcacaggggctcactgtcttgttccgttcagtcagaggactctgggatcaacacttctaaagacctccaaagaggtccctcaggaggaggaaagggcagagggaaaaggagctgacttttaaaagcacaggctttctacttgggttcaacctagatacacagcttaattattttgtgaccttgggcagaccatgcatcatctttgagcctcaagggcctctagacagggaataaagctgtccatttcattaagccatcatacataagtgcttggcatcagcaaatgcaattcccacccttcgatggaggagaccagaggaagaggtccagatgaagatttctggttcctttcctctctgctcccctccccagtgttcccaagttatactatcctgaaactcttcccctccccatacttctgaagctcttgccaagtggggatatcctagagttaccctcctatttgagtgatgtgcctctccttccctcctacctgcaagaatggaggaccttaccccctgaacagcctcccctctgttcctcaccttcaaggaacaagacaacctggcagatgctgaggagcgctgtgatcagctgatcaaaaacaagattcagctggaggccaaggtgaaggagatgaacgagaggctggaggatgaggaggagatgaatgctgagctcactgccaagaagcgcaacgtggaagatgagtgctcagagctcaaaagggacatcgatgatctggagctgacactggccaaagtggagaaggagaaacacgcaacagagaacaaggtaagggcagcctccctttggctccagcccgggtctcatcaggactctcagaccatactgaccttgacccaggctagccactcggcatccagagagcagcatggaccttgacatggagctccccacagatggcaccaagctggtgacctttgaccctaaaggagatgggattcttggtcggcaggtgaaaaacctgacagaggagatggctgggctggatgagatcattgccaagctgaccaaggagaagaaagctctgcaagaggcccaccaacaggctctggatgaccttcaggccgaggaggacaaggtcaacaccctgactaaggccaaagtcaagctggagcagcaagtggatgatgtgagtagattgagagttgtggggcctagatatgccatgtctatctgtgcccagagctctgtgtgtgtgtgtgtgtgtgtgtgtgtgtgtgtgtgtgtgtgtgtgtttgtgtttaatgtttataggggggtagggttagaggatgttaacttttctgatatctttctagaaaggagctggggaatgaaaagtcagaggtggtgatcaattctgaattatgtatctaatctcactggtatgatcaataatagagatgagttttcttatttaatttaagtgcaatcccatatatctctgcctttgacacaagatttagagggtcatctcataagacatgataaatttctttggaaattttgtgaggctccccaagtagaatttttgaaattccaatatttaagggcagaatctgatcattgttccctctgatgcacatatgtctgttgactcacttatcactctgtattttaattatttaagcttctttagataggaacttagatctattcaatttggggactgcagtgcttagcaagagcctgatgcccagtaggtgtttataggatgctgaaagaatgaatacggcggccagcggtggctcacacctgtaatcccagcactttgggaggccaaggcgggtggatcacgaggtcaagagatcgagaccatcctggccaatatggtgaaaccccatctctactaaaaatacaaaaattagctggatgtggtggcgtgcgcctgtagtcccagctactcaggaggctgaggcagaataatcccttgaaccagggaggcggaggttcagtgagccgagatcgcgccactgcactccagcctggcgacaagtgagactccataaaaaaaaaaaaaaaaaaaaggaggaaggaaggaaggaaggagagaaagaaggagagaaagaaagaaagaaagaaagggaaagaaagaaagaatacggctttggggtttcatcccacagtcatttattcctttatctataaaatatgattcagcatcccctatatctaggcaatctcacagtcccctaattaacatttggcccactctggggaaggtttcccaagtcctgaacacaagatttaccaagtcctgaggtaactgaacaacaaaatcaccaagtcaggatgctttgcctcactgggcctgggctccttctctctaccagctggaaggatccctggagcaagagaagaaggtgcgcatggacctggagcgagcgaagcggaagctggagggcgacctgaagctgacccaggagagcatcatggacctggagaatgacaagcagcagctggatgagcggctgaaaaagtactgtgtcccctccctgctgcccttccgcctccccagcccataacagtacaagcagacccaatacagccatcctctgaggcaacaacctcacgcagcctccacaagtggaggtgcaaaccatgggaaaaggcctcccaggcaagggctttcctcccctagtcccagatatcagggttagttagatggtcctccctggcaaaaagtccattgtatcccatgagtcctttcttcttgttaggcactcagtgggaatgaaaataacagccttcccccttcataacacatctctctttggagaccagttccttgacatggaggaaggctccacatgaggagcctcttaggaaagtccctttgtggcttttcacagagagcccacagggcaccaagaaatgccctcacattaaagaagtcaggggtacagggccatttctttgtttgcttaacttgtggttccaattcttagtgtagtcttccaaatgtatagacttccagacttggtaaacagtgagcttgcagaacatattttgataattgaaggtcttatggtgtttcaggctcaggactttgaaaggctttgagaatcatcataatctacatcctcatcaagtttgtgtttgcacaggaatcttcataccttcccaggcacagaatgtgttgaataaatgaataaatacacgatcctatttgattctcaaaacaccttttaaggatggtatctttaatttcactttaccaaagaggaaaataagtttcagaaaggttagctgagttacccaaagcaatagtgacaaaatttaaagaccatcagagctaaaaaggacctttgaaacaatgtagtccgaccccctcattttacattatgagaaaacaaggaccaaagatgggaatgtcctgtagagcccaggccccatcaccctgtctacagcactcctcccattacattcttgttggatttcaatctcaccgcaggtgttacacttccagggatcctacatcacccccagaagctgtttttctaatgaaatcctactctttacctgtatcattaccattttcaccactggtggaccctcctggaggccccacgagtctcccttacctcaccatccctccttccccacagaaaagactttgagctgaatgctctcaacgcaaggattgaggatgaacaggccctcggcagccagctgcagaagaagctcaaggagcttcaggtgaggtctggacacccacgcgggatgctgagtccctgggctggttctgtttcccctgccccctcctctaggtgtcctgttcacagcattacaggaatgattaatgtgtccatggaggcaggcacgcagctatcacagtgtgcccatggatacatccaaaaggggtcagtgatccacagagacctgaaaaggtcacaggcctgagggcaagaattcctggcttcctgtctcagctctgccttagttgggtgacctctgggagcccactccagatctctgggtctccatgccctcccctgttacatggaggtttttaagagtccttcgactctgatggcatgactttcctccttactctagagcagaagctgtgttaggtctttagttgtctggtcaagacaaatacggctctctcattttcaacttttgttatttttttatgactaaactgcttaaaatatccccagaacacaggtctctttgtccatctttaagagcaagtttcaaccatttccttccaataaagagcatgtagactgtcaggccctcgcctaaaggaaggctcttcaaactatcttccccaaatcctttaattcccacctctccactggaagagctaaactgacttgctgttccagagaagccgaggagccttttagagccggggggattccagtggaggggtccaggcgtgggtctgagccttgtgtctgaccaggcacgcatcgaggagctggaggaggagctggaggccgagcgcaccgccagggctaaggtggagaagctgcgctcagacctgtctcgggagctggaggagatcagcgagcggctggaagaggccggcggggccacgtcgtgccagatcgagatgaacaagaagcgcgaggccgagttccagaagatgcggcgggacctggaggaggccacgctgcagcacgaggccactgccgcggccctgcgcaagaagcacgccgacagcgtggccgagctgggcgagcagatcgacaacctgcagcgggtgaagcagaagctggagaaggagaagagcgagttcaagctggagctggatgacgtcacctccaacatggagcagatcatcaaggccaaggtaggctctgctcggcctccctcctccaacttcctcctcccacctcccctttctgtccatgtagtgtctcttccttcatggttcattttcccacttcccttcctctgcctggttctcagatcccctccttcttttcacaccttccctcttcttttctccttcagttgcacctcttacaccccttcattccccccgcccccaacatccatcatattaactctccttcccttctcaggctaacctggagaagatgtgccggaccttggaagaccagatgaatgagcaccggagcaaggcggaggagacccagcgttctgtcaacgacctcaccagccagcgggccaagttgcaaaccgagaatggtgagcctagagcaggggctccatggttcccaccacagtctccccaacctcctgagccactccagcctcgggcacaagccaatacacgcacacacagacacagagtctctccaggaaaatggggcctgagggctagaggaggaggtggggatagagaggagtgctgatctagaatggtgctccccaggtgagctgtcccggcagctggatgagaaggaggcactgatctcccagctgacccgaggcaagctcacctacacccagcagctggaggacctcaagaggcagctggaggaggaggttaaggtaagggctagactcgcgcacctggcccaagcaaggagcacactgactagccttgcatcaaatcacttcccttcccagcaataaggctggctgtggaccaacagttctccaagaattcttgctttatggagaaagctgaacccacctcctggtgcccacccctccccaggcgaagaacgccctggcccacgcactgcagtcggcccggcatgactgcgacctgctgcgggagcagtacgaggaggagacggaggccaaggccgagctgcagcgcgtcctttccaaggccaactcggaggtggcccagtggaggaccaagtatgagacggacgccattcagcggactgaggagctcgaggaggccaagtgagttctgagcagcctgacttctggctgaggcccctttgcaggcaggactcagcccagccccagcctcagcagatcccacacaggcgatgcttagctagtgtttgacaacacaggaggactctgccccggccccacctccttctcctctcagggaagctttttgctcgaattatgtttctgatccgaatataagacgtacaaaaggtttgtctgagggcagagtgcttccgtctggggcagggcactgtggcagggaaaggcagtggggagggctgcagaagcccatacctcctcaatgtccatagcgcagaggctgggccagggtcagagggtgcctgggtctccacgccctgctgggatcctctgcctgatgttctcggcccctgggacctgtcctcaggcttctccagctacacttctgaggtttcaaggattgtctttgagaaggttcatgttgtttacctctttcccccatccacaccctccatcctccccaccctctgccaccctcccctgggcaggaagaagctggcccagcggctgcaggaagctgaggaggccgtggaggctgttaatgccaagtgctcctcgctggagaagaccaagcaccggctacagaatgagatcgaggacttgatggtggacgtagagcgctccaatgctgctgctgcagccctggacaagaagcagaggaacttcgacaaggtgggccctgggtggggcccgcagccagcatgcagggcaagggggcatgaggggttcagtgagaggccagagccatcctccttggaggtgggggaggaggctgagcccaggcaggtcctgagacagaccctggacatggggctgaggcttgggggctgaagagtgagccttctccccgggcagatcctggccgagtggaagcagaagtatgaggagtcgcagtcggagctggagtcctcgcagaaggaggctcgctccctcagcacagagctcttcaaactcaagaacgcctatgaggagtccctggaacatctggagaccttcaagcgggagaacaaaaacctgcagggtgtgctgggggcccaagaggctggggaggggctgcactgcagtgttcccatatggtgccacccaagggctccaagaggcgtctgggcaaagaggcgtgtccctccaactccactggacctcagcagccctcaaaccgagttaccgtgttccccacacagaggagatctccgacttgactgagcagttgggttccagcggaaagaccatccatgagctggagaaggtccgaaagcagctggaggccgagaagatggagctgcagtcagccctggaggaggccgaggtgtgtgtgtgtgcagggcacggggtgcagggagctgagctcaggcttttggtccctgttctcatcccccgctttgtcgttttgttcactgtccatccccagagcctaggacagagcctggcacatagtaggcattcagtgaagatttgtggagtgaatgaatgaccagtcactgaactctcttcacataaacattttacccattgcatcttagctgagcttcccatttccacatacctcccggttcccacctctgcctccctctgttttcttttatactctatacctgattgcctctgtttccttggcaacactttttctcttcattttcctccttgtcttcatagctggctctcccctgtgagggcctgaatcactttctcttaggcttatttttattttctcttagattctcttttcctccaccttctgcttctttgaaccacttacaccactcttgaagtcacttcgtatccatgattagtgagcaggcccccaccctgccctgtgccctgactgtctgcctgcatcccctcccccaaccccttcccaggcctccctggagcacgaggagggcaagatcctccgggcccagctggagttcaaccagatcaaggcagagatcgagcggaagctggcagagaaggacgaggagatggaacaggccaagcgcaaccacctgcgggtggtggactcgctgcagacctccctggacgcagagacacgcagccgcaacgaggccctgagggtgaagaagaagatggaaggagacctcaatgagatggagatccagctcagccacgccaaccgcatggccgccgaggcccagaagcaagtcaagagcctccagagcttgttgaaggtactcacccagaggggactggcctccacgtggcctggcgtaagcagtagtgtcttgatacaggcaccagattcctcctgcccctaggttactgcagggacctctgacaggtgcctttagtgaagggaaccgaggctggctccctgctcatgcccactctcctgatcctcaggacacccagattcagctggacgatgcagtccgtgccaacgacgacctgaaggagaacatcgcaatcgtggagcggcgcaacaacctgcaggctgagctggaggagttgcgtgccgtggtggagcagacagagcggtcccggaagctggcggacagggagctgattgagactagtgagcgggtgcagctgctgcattcccaggtgagcaagctcccctgctgattcctgaagggagcacaggctggggctcagcaagcaaggcttagagctatgcatagatgctcaatgcttaacctacatctacccaaccctcccccaacccagaacaccagcctcatcaaccagaagaagaagatggatgctgacctgtcccagctccagactgaagtggaggaggcagtgcaggagtgcaggaatgctgaggagaaggccaagaaggccatcacggatgtaagtcccccactccaccgacccgatccagaccagtgtctctccgtgggctgggcagcaagtgtgtgaggacttgaccagaccatgtgccacctctctcctgcacacaggccgccatgatggcagaggagctgaagaaggagcaggacaccagcgcccacctggagcgcatgaagaagaacatggaacagaccattaaggacctgcagcaccggctggacgaagccgagcagatcgccctcaagggcggcaagaagcagctgcagaagctggaagcgcgggtgcgggagctggagaatgagctggaggccgagcagaagcgcaacgcagagtcggtgaagggcatgaggaagagcgagcggcgcatcaaggagctcacctaccaggtgcgacgggcggtgactccaggcagagccctggcaccatagccacagtgacaaccagctgaggagaatgaagagtttgctcttagcctcttccagggcgaggatgggaatgcagcccccgtttcactttgcctagccctgccccactctgaatgtccctagctcagaggtcagtctctgagcctcctggcctgggagctccatctcaacacccactcttagcccatcgccaggggacacacacagaattccagacaaagctcacccagtacagctcaccagaaagcaaatatgtagccagggtcacccccaaaagacaccaaaaacacacccatcccattcaaacaagcataaaaactttttcattgcccagggcagtgtggactctagctttctgaggtgttttcttagaatcagactctgaattagaatttgtttcttttccaatccaggatgtcactatctctctaagcacacttgtccttaacttagattaagtcagtgtttctggcctgcattgcagcccagaaattccatcacactcatagccccaaagtcactcccagcatgtgccgaggtccagagcagggacttcatcccgcatggtccccggaccctgaaaaacctgctccctggagcactgcacacacacaattttgtgcataatttcagagtcccactagttctttggactctttcctggtacagatcatttaaaatatttacacatatttggtaagaaattataaggagaattcaagtgtttagtgaggatcagaaagtagaattgggtcaggatatcagatgaagcagggcagggcggaggggatgctaccttctatgactgtgccatcttcaccccctgcctaccctctggcccccagacggaggaggacaggaaaaacctgctgcggctgcaggacctggtagacaagctgcagctaaaggtcaaggcctacaagcgccaggccgaggaggcggtgagtgaccctgctggggactaggcccaggggaggcataggagagctcgtccccaagccaggagtctgagaacccaggccccctctcacctcatgctcccacctcccgcaggaggagcaagccaacaccaacctgtccaagttccgcaaggtgcagcacgagctggatgaggcagaggagcgggcggacatcgccgagtcccaggtcaacaagctgcgggccaagagccgtgacattggcacgaaggtgggtccctcttttgggctttgctagtcacccccacagcaggcatacccagacagagcaccctcaaacccgggatgcttccttttcatttaattccacacacttgagccacatggccccagaggcaaggtaatgcagttctctctcatttcaaggattattccagctctaactttttttttttttttttttgagacggtgtctcactctgccgcccaggctggagtgcagtggcacaatctcagctcactgcaacctctgcctcctgggttctcctgcctcagcctcccaagtagctgggattataggcatgtgctaccatgtcatgctaatttttatattttagtagagatgcggtttcaccaatgttggccaggctggtcttgaactcctgaccttgtgatcccactcgcctcagcctcccaaagtacggattacaggcgtgacagcccagtccaggctcagctctaaagttcagcctcagaactgccccgaacatgatcctggctttgtttcctttcaaaagggcttgaatgaggagtagctttgccacatcttgatctgctcagccctggaggtgccagcaaagccccatgctggagcctgtgtaacagctccttgggaggaagcagaataaagcaattttccttgaagccgagatcctgactcttcttcactgccctgattgaagccgagatcctgactccagactcttcttcactgccctgaggacccggggatggggtctggggaggtggaaatgcaggggagtgggggcaaattcaaaggcctggcctaggaggcttcgtggagcagcactgaaaacccctttcacttcccccaaaccagccaaatgcagcagaggcgacacctctcctcccagccttctccctggtccagccaggatttaaaggagatttagggagacctcttacgcttcatggtcataagggtctagctctgttggccagaatgtccctttattactggtcgtgtgactggtgaatctgccaatgtaaagtaatccattcagcgattgagcgtcaaaatgtaggtatttccatgagcgtttttcctgttgcaatggctggcggtaatattgttctggatattaccagcaaggccagatgtttgagttcttctactcaggcaagtgatgtattactaatcaaagaagtattgctacaacggttaatttgcgtgatggacaggactcttttactcggtggcctcactgattataaaaacactctcaggattctggcgtaccgttcctgtctaaaatccctttaatggcctc

SEQ ID NO: 216 - DNA, 507 bp, Homo sapiens
  misc_feature (1)...(507): n=a,t,g or c
ggttacaattcacattccttattctgagaatttggccccagctgtttgcctttgactccctgacctccagagccagggttgtgccttattgtcccatctgtgggcctcattctgccaaagctggaccaaggctaacctttctaagctccctaacttgggccagaaaccaaagctgagcttttaactttctccctctatgacacaaatgaattgagggtaggaggagggtgcacataacccttaccctacctctgccaaaaagtgggggctgtactggggactgctcggatgatctttcttagtgctacttctttcagctgtccctgtagcgacaggtctaagatctgactgcctcctcctttctctggcctcttcccccttccctcttcttctttcagctaaggctagctggtttggagtagaatggcaacttaattctaatttttatttattaaatatttggggntttggttttaaagccagaattacggctagcacctagcattt

SEQ ID NO: 217 - DNA, 340 bp, Homo sapiens
  misc_feature (1)...(340): n=a,t,g or c
attcggcacgagtttcaaagaaaatagattaggtttgcgggggtctgagtctatgttcaaagactgtgaacagcttgctgtcacttcttcacctcttccactccttctctcactgtgttactgctttgcaaagacccgggagctggcggggaaccctgggagtagctagtttgctttttncgtacacagagaaggctatgtaaacaaaccacagcaggatcgaagggtttttagagaatgtgtttcaaaaccatgcctggtattttcaaccataaaagaagtttcagttgtccttaaatttgtataacggtttaattctgtcttgttcatttgagtattt

SEQ ID NO: 218 - DNA, 276 bp, Homo sapiens
  misc_feature (1)...(276): n=a,t,g or c
gatccgctacagcaacgtgaagaagctggaaatnaagccaaagtacccgcactgcgaggagaagatggttatcatcaccaccaagagcgtgtccaggtaccgaggtcaggagcactgcctgcaccccaagctgcagagcaccaagcgcttcatcaagtggtacaacgcctggaacgngaagcgcagggtctacgaagnatagggtgaaaaacctcagaagggnaaactccaaaccngttgggagncttgtgcaaaggnctttgcagnttaaaaaaa

SEQ ID NO: 219 - DNA, 2073 bp, Homo sapiens
tggttgtgtgggacaaggtgctcctgacagaaggatgccacagctgagcctgtcctcgctgggcctttggccaatggcagcatccccgtggctgctcctgctgctggttggggcctcctggctcctggcccgcatcctggcctggacctataccttctatgacaactgctgccgcctccggtgtttcccgcaacccccgaaacggaattggttcttgggtcacctgggcctgattcacagctcggaggaaggtctcctatacacacaaagcctggcatgcaccttcggtgatatgtgctgctggtgggtggggccctggcacgcaatcgtccgcatcttccaccccacctacatcaagcctgtgctctttgctccagctgccattgtaccaaaggacaaggtcttctacagcttcctgaagccctggctgggggatgggctcctgctgagtgctggtgaaaagtggagccgccaccgtcggatgctgacgcctgccttccatttcaacatcctgaagccctatatgaagattttcaatgagagtgtgaacatcatgcatgccaagtggcagctcctggcctcagagggtagtgcccgtctggacatgtttgagcacatcagcctcatgaccttggacagtctacagaaatgtgtcttcagctttgacagccattgccaggagaagcccagtgaatatattgccgccatcttggagctcagtgcccttgtgacaaaaagacaccagcagatcctcctgtacatagacttcctgtattatctcacccctgatgggcagcgtttccgcagggcctgccgcctggtgcacgacttcacagatgacgtcatccaggagcggcgccgcaccctccctagccagggtgttgatgacttcctccaagccaaggccaaatccaagactttggacttcattgatgtactcctgctgagcaaggatgaagatgggaagaagttgtccgatgaggacataagagcagaagctgacacctttatgtttgagggccatgacaccacagccagtggtctctcctgggtcctgtaccaccttgcaaagcacccggaataccaggagcgctgtcggcaggaggtacaagagcttctgaaggaccgtgagcctaaagagattgaatgggacgacctggcccagctgcccttcctgaccatgtgcattaaggagagcctgaggctgcatcccccagtccctgccgtctctcgctgctgcacccaagacattgtgctcccagacggccgggtcatccccaaaggcattatctgcctcatcagtgtttttggaacccatcacaacccagccgtgtggccggaccctgaggtctatgacccctttcgctttgacccaaagaacatcaaggagaggtcacctctggcttttattcccttctcagcagggcccaggaactgcatcgggcaggcgttcgcgatggcggagatgaaggtggtcctggggctcacgctgctggccttccgcgtcctgcctgaccacaccgagccccgcaggaagccggagctggtcctgcgcgcagagggcggactttggctgcgggtggagcccctgagctgagttctgcagagacccactctgaccccactaaaatgacccctgattcatcaaaagtgaggcctagaattaccctaagaccctgttccacagtcctgtattccatcctagatatctactcaaaataattgagacaagtgttcaaacagaaagacgcttgtgcggaatgttcatggcagccctattcacagtagcccaaacgatgaaaacaccccaagctatatattaccagataaaaggataaacacaatatggtccatccatacactggagtattacacagccataaaaaggaatgaagcagtgatccccactacactgtggatgaaccttgaatgcatgatactgaatgaaagacatcagatgcaaaaggtcacatagtgtactgtccttttatatggaaatttccaagaaacagggccaatctgaagagatgtatagtggattggtgcgtttcagcagctggggggggggggggg

SEQ ID NO: 220 - DNA, 429 bp, Homo sapiens
gttcagagagattttcattgggtgcattctctctgcttcgtgtgtgacaagttatcttggctgctgagaaagagtgccctgccccacaccggcagacctttccttcacctcatcagtatgattcagtttctcttatcaattggactctcccaggttccacagaacagtaatattttttgacaataggtacaatagaaggtcttctgtcatttaacctggtaaaggcagggctggagggggaaaataaatcattaagcctttgagtaacggcagaatatatggctgtagatccatttttaatggttcatttcctttatggtcatataactgcacagctgaagatgaaaggggaaaataaatgaaaattttacttttcgatgccaatgatacattgcactaacctgatgggagaggttatccaaagtactg

SEQ ID NO: 221 - DNA, 958 bp, Homo sapiens
cgtctcagctccagaaccgactccgctccgcactggccttggtcacaggtgcggggagcggcatcggccgagcggtcagtgtacgcctggccggagagggggccaccgtagctgcctgcgacctggaccgggcagcggcacaggagacggtgcggctgctgggcgggccagggagcaaggaggggccgccccgagggaaccatgctgccttccaggctgacgtgtctgaggccagggccgccaggtgcctgctggaacaagtgcaggcctgcttttctcgcccaccatctgtcgttgtgtcctgtgcgggcatcacccaggatgagtttctgctgcacatgtctagggatgactgggacaaagtcatagctgtcaacctcaagggcaccttcctagtcactcaggctgcagcacaagccctggtgtccaatggttgtcgtggttccatcatcaacatcagtagcatcgtaggaaaggtggggaacgtggggcagacaaactatgcagcatccaaggctggagtgattgggctgacccagaccgcagcccgggagcttggacgacatgggatcccctgtaactctgtcctcccagggttcattgcaacacccatgaccaagaaagtgccaaagaaagtggtggacaagattactgaaatgatcccgatgggacacttgggggaccctgaggatgtggcagatgtggtcgcattcttggcatctgaagatagtggatacatcacagggacctcagtggaagtcactggaggtcttttcatgtaactgcctcaaggaccctggactctgctcacccccccaccactctgcctggcctcctgctgatgaggactctaagttcccaggatacaaaaggggtggcagtgtatggttcaggaatgctgaatatgggaagcaggggtgcttgtgaccctaataaattccatatcctcttccctgcc

SEQ ID NO: 222 - DNA, 462 bp, Homo sapiens; identical to SEQ ID NO: 3
  misc_feature (1)...(462): n=a,t,g or c

SEQ ID NO: 223 - DNA, 465 bp, Homo sapiens; identical to SEQ ID NO: 4
  misc_feature (1)...(465): n=a,t,g or c

SEQ ID NO: 224 - DNA, 3457 bp, Homo sapiens; identical to SEQ ID NO: 5

SEQ ID NO: 225 - DNA, 1486 bp, Homo sapiens
gaattccaaatgcactcaagcagagaagaaatccacaagtactcaccagcctcctggtctgcagagaagacagaatcaatatgagcacagcaggaaaagtaatcaaatgcaaagcagctgtgctatgggagttaaagaaacccttttccattgaggaggtagaggttgcacctcctaaggctcatgaagttcgcattaagatggtggctgcaggaatctgtcgttcagatgagcatgtggttagtggcaacctggtgaccccccttcctgtgattttaggccatgaggcagccggcatcgtggaaagtgttggagaaggggtgactacagtcaaaccaggtgataaagtcatcccgctctttactcctcagtgtggaaaatgcagaatttgtaaaaacccagaaagcaactactgcttgaaaaatgatctaggcaatcctcgggggaccctgcaggatggcaccaggaggttcacctgcagcgggaagcccatccaccacttcgtcggcgtcagcaccttctcccagtacacagtggtggatgagaatgcagtggccaaaattgatgcagcctcgcccctggagaaagtctgcctcattggctgtggattttcgactggttatgggtctgcagtcaaagttgccaaggtcaccccagggtctacctgtgctgtgtttggcctgggaggggtcggcctatctgttgttatgggctgtaaagcagctggagcagccagaatcattgctgtggacatcaacaaggacaaatttgcaaaggctaaagagttgggggccactgaatgcatcaaccctcaagactacaagaaacccattcaggaagtgctaaaggaaatgactgatggaggtgtggatttttcgtttgaagtcatcggtcggcttgacaccatgatggcttccctgttatgttgtcatgaggcatgtggcacaagtgtcattgtaggggtacctcctgattcccagaacctctcaataaaccctatgctgctactgactggacgcacgtggaaaggagctatttttggaggctttaagagtaaagaatctgtcccgaaacttgtggctgactttatggctaagaagttttcactggatgcattaataacaaatattttaccttttgaaaaaataaatgaaggatttgacctgcttcgctctggaaagagtatccgtaccgtcctgacgttttgaaacaatacagatgccttcccttgtagcagttttcagcctcctctaccctacatgatctggagcaacagctaggaaatatcattaattctgctcttcagagatgttaaaaataaattacacgtgggagctttccaaagaaatggaaattgatgggaaattatttgtcaagcaaatgtttaaaatccaaatgagaactaaataaagtgttgaacatcaactggggaattgaagccaataaaccttccttcttaaccattcaaaaaaaaaaaaaggaattc

SEQ ID NO: 226 - DNA, 1167 bp, Homo sapiens
attctgagccaagtccggtgccaagcgcagctagctcagcaggccgcagcggtggcctgagcttcaggacagccagctccctcccggtctcgccttcctcgcggtcagcatgaaagccttcagtcccgtgaggtccattaggaaaaacagcctgttggaccaccgcctgggcatctcccagagcaaaaccccggtggatgacctgatgagcctgctgtaaaacatgaatgactgctactccaagctcaaggagctggtgcccagcatcccccagaacaagaagtggagcaagatggaaatcctgcagcacgtcatcgactacatcttggacctgcagatcaccctggacttgcatcccactattgtcagcctgcatcaccagagacccgggcagaaccaggcgtccaggacgccgctgaccaccctcaacacggatatcagcatcctgtccttgcaggcttctgaattcccttcggagttaatgtcaaatgacaggaaagcactgtgtggctgaataatcatgacttcttttttttctttgcacaacaacgacaacaacaaattcacagaaccttttcagcgctgaacttatttttcaaccatttcacaaggaggcagttgcatgacttttaaaagcaaaaaaggagaaactagatgaaaaagacttttaaatgccctttctgcagttggaaggtttttttcatatactattcccaccatggggagcagaaacgttaaaatcacaaggaattgcccaatctaagcagactttgccttttttcaaaggtggagtgtcaataccagaaggatccagtatcagtctcttaaatgaagtcttttcggtcagaaattacctttttgacacaagcctactgaatgccgtgtatatatttatatataaatatatcttatttaagtgaaaccttgttaactctttaattagagttttcttgtatagtggcagagatgtctatttctgcattaaaaagtgtaatgatgtacttattcatgatgaactttttataaaagtttaaacttttagttgtaaacgtaacccttttatacaaaataaatcagtgtgtttattgaatggtgattgcctcgtttatttcagaggaccagtgctttgattttttattatgctatgttataactgaaccaaataaa

SEQ ID NO: 227 - DNA, 2255 bp, Homo sapiens
gctggcctgtttgggtactgggggaacaaaggtggagtcaacatctgcctgaagctttatggctactatgtcagcatcatcaactgccacctgcctccccacatttccaacaattaccagcggctggagcactttgaccggatcctggagatgcagaattgtgaggggcgagacatcccaaacatcctggaccacgacctcattatctggtttggagacatgaactttcggatcgaggactttgggttgcactttgttcgggaatccattaaaaatcggtgctacggtggcctgtgggagaaggaccagctcagcattgccaagaaacatgacccgctgctccgggagttccaggagggccgcctactcttcccgcccacctacaagtttgataggaactccaacgactatgacaccagtgagaaaaaacgcaagcctgcatggaccgatcgcatcctgtggaggctgaagcggcagccctgtgctggccccgacactcccataccgccggcgtcacacttctccttgtctctgaggggctacagcagccacatgacgtacggcatcagcgaccacaagcctgtctccggcacgttcgacttggagctgaagccattggtgtctgctccgctgatcgtcctgatgcccgaggacctgtggaccgtggaaaatgacatgatggtcagctactcttcaacctcggacttccccagcagcccgtgggactggattggactgtacaaggtggggctgcgggacgttaatgactacgtgtcctatgcctgggtcggggacagcaaggtctcctgcagcgacaacctgaaccaggtttacatcgacatcagcaatatccctaccactgaagatgagtttctcctctgttactacagaaacagtctgcgttctgtggtggggataagaagacccttccagatcccgcctggctccttgagggaggacccactgggtgaagcacagccacagatctgagccaggatgggagtgaatcccaggcggaggccagagctggcagccagctctgcctttccactgccgggagtgctgggggcccagcctggccccctgaagagacagccaagtgtcgtccacatactcctcccagagtgagctctaaccaggctcatttgctctctccactactcatctctggaattagccgcttaaatacaggtttttgttgctgagatgtgagtgaaaccagctagtgtgtcaacagtgaagacctggggacagttctgcgtctcatttctggattcctaccccctcttctagtcttgcccaagtagtcctgccaggcacatgccccatttggcacaggcctgcattcttgtcgtgccgtcctgggcctcaggctgtctgggaggggagatgctcacatttgtacaggctacatagactggtgcaagcagtgctggattccaggagtcttggcatctcatagcttgtccccgtgaggagtgagcagagggtctgggatttctgctttcagcaaaagcagtctgactcagtgggcagaatggaggggcccctctagccaggctcttacgccatggttatgagcaggttgatgagggtccttcggccagcacaaccttcctccctactcacggcatggagtctgactgcatggaagttccagatcctgacagagagaactgggaaggatccaggttcgcttccgttggtagcttgagtcccatgcctccaccctgccatctgaggaaggggtgacaagtggtcaaggagctgtggccacagacttttccagggtggtccttggcaggtgaggtgcgtctgtsccacccttgtcaggagccattgacgacgggccccccctggaccccccgggacctcagagtgggggcaggcagaagggagaaccagctcaagacattttggaggatctggccctggggttcttcagagaacaccctctaggggctttggggacatggcctgtccccacatccagcacttgcctccgccatggtcactcggcagcccttttcccaggagaagacacctctgggagcctgctcagtgcttgtcctgccatcctgtgtcctgggactgagggttactccagttgctctgtgttgcatactctcccccgcaagcctgtgtatgaagaattgtcccctggcttccagcaggccatggctggctgttttgtgactgttacattgtgcaggggtaattattagcgtggcttttaaaaaaaaaaaaaaaaaaaa

SEQ ID NO: 228 - DNA, 40046 bp, Homo sapiens; identical to SEQ ID NO: 7

SEQ ID NO: 229 - DNA, 1795 bp, Homo sapiens
acgcgtccgcccacgcgtccgcccacgcgtccggtcggggccagagcgcaggtgtacctggcggccgtgctggagcacctgaccgccgagatcctggagctggctggcaacccggcccgcgacaagaagacccgcatcatcctgcgccacctgtagctggccattcgcaacggcgaggagcttaacaagctgctgggcgaagtcaccatcgcgcagggcggtgtcctgcccaacattcagggcgtgcttctgccccagaagaccaagagccaccacaaggccaagggtgaaaaccattcactaggagaggagaaacacaatggccaccaagacagagttgagtcccacagcaagggagagcaagaacgcacaagatatgcaagtggatgagacactgatccccaggaaaggtccaagtttatgttctgctcgctatggaatagccctcgtcttacatttctgcaatttcacaacgatagcacaaaatgtcatcatgaacatcaccatggtagccatggtcaacagcacaagccctcaatcccagctcaatgattcctctgaggtgctgcctgttgactcatttggtggcctaagtaaagccccaaagagtcttcctgcaaagtcctcaatacttgggggtcagtttgcaatttgggaaaagtggggccctccacaagaacgaagcagactctgcagcattgctttatcaggaatgttactgggatgctttactgccatcctcataggtggcttcattagtgaaacccttgggtggccctttgtcttctatatctttggaggtgttggctgtgtctgctgccttctctggtttgttgtgatttatgatgaccccttttcctatccatggataagcacctcagaaaaagaatacatcatatcctccttgaaacaacaggtcgggtcttctaagcagcctcttcccatcaaagctatgctcagatctctacccatttggtccatatgtttaggctgtttcagccatcaatggttagttagcacaatggttgtatacataccaacttacatcagctctgtgtaccatgttaacatcagagacaatggacttctatctgcccttccttttattgttgcctgggtcataggcatggtgggaggctatctggcagatttccttctaaccaaaaagtttagactcatcactgtgaggaaaattgccacaattttaggaagtctcccctcttcagcactcattgtgtctctgccttacctcaattccggctatatcacagcaactgccttgctgacgctctcttgcggattaagcacattgtgtcagtcagggatttatatcaatgtcttagatattgctccaaggtattccagttttctcatgggagcatcaagaggattttcgagcatagcacctgtcattgtacccactgtcagcggatttcttcttagtcaggaccctgagtttgggtggaggaatgtcttcttcttgctgtttgccgttaacctgttaggactactcttctacctcatatttggagaagcagatgtccaagaatgggctaaagagagaaaactcactcgtttatgaagttatcccaccttggatggaaaagtcattaggcaccgtattgcataaaatagaaggcttccgtgatgaaaataccagtgaaaagatttttttttcctgtggctcttttcaattatgagatcagttcattattttattcagacttttttttgagagaaatgtaagatgaataaaaattcaaataaaatgataactaagaaaaaaaaaaaaaaa

SEQ ID NO: 230 - DNA, 38374 bp, Homo sapiens
gatctcactctgttgcccgggctggtgtgcagtggcaagatcatagctcactccagcctccacctccagggctcaagccaacctcctgcctcagcctcccaagtagctgggactacaagcacaggccacccaccacacctagctaatttttttttttttttttaagatggagtcctgctctgtcgccaggctggagtgcagtggcacgatcttggctcactgcaacctccatctcccaggttcaagtgattctcctgcctcagcctcccaagtagctgggattacaggcgagtgccaccacgcctggctaatttttgtatttttagtaaagacagggtttcaccatgttgggcaggatggtttcgatctcttgacctcgtgatccgccggcctcagcctcccaaagtgctgggattacaggtgtgagccacagcacctggctagctaatttctttctttcttttttttttttttttttttttgagagataatggggtttcactatgttgcccaggctggtctcaaactcctgacctcaagcaatccacctgccttggtctcccaaagtgctgggattacaggcatgagtcactgcacctagtttcattcaatgcttattaactgagagaatggcttggctctttcttctgtccctccctcgccaagtggcctgggccgagccccttgacttcagtgccttggtgtctgctccccatgtgtgcccttcctttaggcatcccctgggatgaagaaagttctgcatcagtcactggccagacccaacccaggatggtctgcctcagaggtgagggaggcttccttagtcctccgtcaatgccctggctatgctcaatgggtgtctaacgatcttttttttttttttcttttctttttttttttttttgagactgagtctcactctgttgcccaggctggagtgcagtggcgtgatctcagctcactgcaagctctgcctcctggattcatgccattctcttgcctcagcctcccgagtagctgggactacaggcgcctgccaccacgcccggctattttttgtatttttagcagagacggggtttcaccatgttagctaggatggtctcgatctcctgacctcgttatccacacgcctcggcctcccaaactgctgggattacaggcgtgagccaccgtgcccggcctctttttcttttcttttctttttttttttttaaacacagtctcttgctgtcacccagactggagagcagtggtgcagtcataggtcactgcagcctcaaacccctgggctcaagtgatcctcctgcctcagcctcccgagctgggaccacaggcacgcaccaccatgccctactgatttaattttttgtagagaaagaatattgctatgttgcccaggctggtcttgaactcctagactgaagcacgcctcccacctcggcctcccaaagcgctgggagtataggcgagagctaccactcccagcctaacgatctctcttgaactgcaaaacccctagcttgggctggctgaggtcaagatgagcccttccccaaggaggcggcgtcagtgcaggacagcagcttaggcagcacctaaggacttttattgaccacatgaccccctcaggggtgctagtggggtatccttcggcatcctggcagcagccgccgccacagttcttggctgagcagctcctgttccctgcgggcaccctgaagcacgctccggttctcctgggccctccggatcaggtaggggattacctcctccaaggagccatagggaatggacttatacactacatagccggcctgccctgcagggagagtgggttttgttttttcgtttttggtgtttttctgagacagagtctcgctctgttgcccaggctggagtgcagtggtgcaatctcagctcactgcaagctctgcctccaggttcaagcgattctcatgcctcagcctccagaatggctgggattataggcgcttgccacgacgcccggctcatttttgtatttttagtagagatggggtttcaccatgttggccaggctggtctcgaactcctgacctcaagttatcctcctgctttggcctcccaaagtgctgggattacaggcgtgagccaccatgcccagcctggagtgttgacagggtatgggcttgggctggggggacactccccagtccccacctggaacagagacttctgtttctgagaacatggcagattaagtgagttggataaaatttctaactgaaaaagctaaaagtcctggagcaaacttttttttttctctcttagacagggtctagccctgtggcccaggctggagtgcagtggtgtgatcacgactcactgctgctttgacctcccaggctcaaacaatcctcccacctcagcctcctgaatagctgggaccacaggcatgcacctccacgcccagctaactgtttttattttatctcaattgattaattaattaattaattaattttgagacagagtcttggtctgtcgccctggctggagggcagtggcacaatctcagcacactgaccaacctggccaacatggtgaaaccccgtctctactaaaaatacaaaaattggctgggcatggtggtgcgtgcctataatcccggctactggggaggcggaggcaggagaatcacttgaacccaggaggcggaggttgaagtgagctgagatcgtgccactgcactcaagtctgggcgacagagccagactctgtctcaaaaacaaaataaataagctgggcgtggtggctcacgcctgtaatcccagcaactctgggaggccaaggcaggcagatcacctgaggtcaggagtttgagaccagcctggcaaacatggtaagaccccatctctactaaaaatacaaaaattagctgggcgtggtggcagccgtctgtaatcccagctacttgggaggctgaggcaggagaatcgcttgaacctgggaggcaaaggttgcagtgagccaagatggcaccactggactcctgcctgggtaacagagcaagactctgtctcaaaataaataaataaataaaataaaataaaagagaaaatgagaacccagagagagaagagacacacagcaagccacttctgccccaaaagcaaaaccgaggtgctatctgatgaattcacagagttgcggggggacattgagtcagtcttcaagcctgaggtgagagttataagggagaacttccccaagttaagctggaacccaaaaatctacacccttagagtaagagttaataaaaagtcaaccctgcaaccttcccccagtcccaggaaatggtcttggccataaacagatcaaggaagaaaacagaaaaatccacctctgcgaagttggggctatgggttaacccccttatgtatttgcagctcaaatttgtgccagtggggtgtttcaagaaacctcaagctatgaatttaggataaagtgatttcgttctgcttagcacctggcagaaggaaacattaattacctggtgtcaggccctgaggagcagcacagtaaagataacaaaacacacaagaaataatacaccatgatcaagaaccagcagaaatgacagacggcagacacagagacacagccttggaaggcccacagacactggaatgacagatctctctggaaggatctggaggctgggccttggttgggaataggagaagggctctggctgggagggagtaaggcctggggcttgatgggggtgggggagccattcacatacccagtgctagagagacgtggtcacacatgcccagaagttgtccgaaacagacagtcccatccagaggaatgcccagctcccacatgctacagaaaaggccacatcatcagtccagactgtggctgcatctacagcttaaagtcagccactatgcacccatatggcggctccagtaattcaaacattgaagtatttccaaactcaatgatacataataaccagtcctttgcattccttgaaggtcccccagtgactcccagccagttccctggagccctcagacctcctcatgccccagcaaataaggggcaacgtcttgtccatctgggacctataaggacttacaggtatagcaggggttaatgtgtttgtttgtttgtttgttttaagaggtagggacttgctttgttacccaggctggagtgcagtggctcaagcactgctcactgcagtctcaacctcttgggctcaagtgatccttccacctccggaatagctgggactacaggtgtgcgccaccacacccagctgtttttttttttttaatttgttgtagaaatggggtcttgctgtgttgcccaggctggtctcaaacaatcctccaccttcgcctcccaaagtgttgggattataggcatgtgccaaccatgcctggctataaatatttttaaaattctccccagaacacctctgtccatctctggcatttgagcaaaggagaggaagggagggcccttttgtgggcacctatttcccgcccatccctccacctcataccgcttggttgcctggcgaacagattcctcattgtgggaagccaccatgaggtggcacatggggccatggcgggccacgtgcgtcagcatcagttccaggcagcggctgtaactgaagggagatgctctgttcagctcacctggtgagcgagggtcaggccccagcgactggggtgggtggggtgctcctaagcaaggggtctctggaaccagtactctgttccatctgcaccagttgtaagggacatcacttctctgagccactttcatcttctggggttttttgggggttttgtttgtttgtttttgagatggagtcactctgttgcccaggctggaatgcagtggcatgatctcagctcactgcaacctccacctcccaggttcaagggattctcctgcctcagcctcccgagcagctgggattacaggcgtgcaccatcacacccggctaatttttgtatttttagtagagacggagtttcgccatgttgcccaggctggactcgaactcctgacctcaggtgatctgcccgcctcagcctcccagagtgctgggattacaggcgtgagccaccgcacccggccccatgttaatctcttgtcactgtgagtttccgagcaacactgttgtgaggatggagtgagataagggggatatgaagtctttgggacagtggcggcggtctcacaggagagggtcgcatcacatgcacaagatgacatttccccaaggttatcactgctgcattgtcaacagaacatcactagcaacagcccaaatgtccataaatggggaactggctaaggaaattgtggtacagagaagatagtgctctatcgcgcaactgtgaaaaggaaggaagacactgtctgggtactgatatggaagaggaaatagattggcaaacaccttgcaagcatgctgcaggccacgggccacgctatgtatttcacatcctctgtgggtcttccctatcgccccccagacctgttttctacccttctctgcccctcaggaagctgacacttttgccccacatcccccatggagtcatgtgcaggaaggagtgtgggtgtctcacctcggcccctccctgctcaccctgactgtgttctgtgtgtggccacagctccctaaggtggcccctctccttcaactacagcataggggtcaaaatagcttcctaatagcttccctgactttgcccacacttccttttcgttttgtgttttttagagactgggtctcactctgttgcccaggttggagtgcagtggcgtgatctcggctcacggaatcctccaactcctgggctcaagcgatcctcccaccttgggctcccaaagtgctgggattacaggtgtgaggccctgcacctggcccctgacacttctataaacagcctcttcaccacatttcctttagttaaaaccctttgtgcagaattctgtttgctttggagaaagctaatcactcatctaattcccacatcaactctgggaggcagatgttcttattccattttaacagagtggggagactgaagctgagaggggttctatctcttgtccccaggtcacacagctagaggtggccaggctgggatttgaactcaggctgtctgatgctccagagcccaggctccttatcggtaggctagtctgcctttaaaatgcacagttgtggctggacatgctggcttacgcctataatcccagcacttggggaggccaaggcaggagggctgcttcagcctaggagttcaagactagcctgggcaacatagggagaccccgtgtctacaaaaataaaaaaatgtgttgggtatggtggtgtgcgctggtggtcttagctactggggagactgaggtgggaggatggcttgggcctggggagtcaaggctgcagtgagccaagatcgcaccactgcactccagcctgggcgacagagtgagaccctgtctcaaaaataacttaaaaaacaaatgaaaaaagccaaatatacaagggcacatattgtatgattccatttataagattgtctagaataggcaaatccacagagacaaaaagtaggttagtggtttccaggggctgaggggaggagggaacagaaggcagctgactgctcattggtatgaggttactttttggggtgatgaaaatattgtggaatcaaagagtggtgatggttgcacaattttgggaatatactaaactccactgaattgtacatgttaaaattgtgaattctatgatacgtgaattatatttcaatatttaaaataatagtgcaaattattattattattttgagatggagtctcactctgtcgcccaggctggagtgtagtggctcaatcttggctcactacaacctttgcctcctgggttcaagtgattctccttcctcagcctcccaagtagctgggattaccagtgcaagccaccacacccggctaatttttgtatttttagtagagacagggtttcaccatgtttgtcaggctggtctcaaactcctgacctcaggtgatctgcctgcctcagcctcccaaagtgccgggattacaagcgtgagccaccatgcccggccataattttttgtgtttaatgttttttacagatggggtcttgctatgttgtgcagattgggctcaaacccctgggctcaagcaatcttcctgcctcagcctcccaagtagttgggatgacaggtgcacaccactgtgcctggcttggtgccagttaagctgatggtacacaaacgtgccctggagcccctgcagatcttggacatgagcctggattccaagcgtggctaggccacctgctctgtagcctggctgagtccctgtggcccccagagaaggtaccaagaagtaaagatctaaggaggtgagggatggggccatgccactgtctgcagtgggaatgtcccaggcagtggaaacaggatgtgccaagcccctgggtaacatggaggaggccagtgtggctgtagtggagtgagggagaggaagagagggagggaaagttagggaagtgacagggagcatgtggggcttagaggccactgtaaggatttctttttgttttgttttgtttgtttgtttgtttgtttgtttgttttgagacagattctcgctctgctgcccaggctgaagtgcagtggtgcagtcatggctcactgcagccttgaactcctggcctcaagtgatcctcccacctcagcctcctaagtggctggaaccacaggcatgtgctaccacacctgactatttttaaaattttttagagatggggtctccctgtgttgcccaggctggtctccaactcctgctctcaagtgaatctctagcctcagcctcccaaagcactgggattacaggtatgagccactgcacccaaccactaggtgttattatttcctgcagaggccagctggcccgggcctacctctgactggtggcctcatagtcaggctgagtggggtcttccatcccatggagctgggccaccgctctctccttgtccagatatgcacctcgtaccagcttcactccgaaggccaggccggccctgtgcgcagcctctgcatccctccccagccgctcgaatgtgtcctatagggcacgcaggcaggttctggtaggtcagggtgtggggaccccagcctgtacctcctggaacacactgcacacctttagacaggcctggtaggtgttccacacccagggcccgccttcacccgggctgttccagcgcacagccagggcagccaccagcagcgagagcgcagggttcagtgaggtgtactccgcatccaccaggagccgcacgtgctgggcccgggcatactgatggcgacagagacgacggtcagggccccgggtgtccagcaggggcagtggagccagatcccagcaggaggggttacctgtgccacccgatgcaggcggctgagggaggcccggaggtgctggttccagcaggaggggttacctgtgccacccaatgcaggcggcagagggaggcccggaggtgctggttccagcaggaggggttacctgtgccacccgatgcaggcggctgagggaggcccggaggtgctggttctgctcagcattgaggcaggagacctggaggttctagggggcagcaggggaagtggggaaaagcttataagttgctagaaatctaaaaatgagcaatatcagttaggtactatttattgagggggttatgagcctagaatcagggctcgaatccaggcttcaccacctactgtgtgaccttgggcaagttatgtaacctttctgggcctcagtttttgtttgtttgttttttgaaacagagtcttgctctgttgcccaggctggagtgcagtggcatgatctcagctcactgcaacctctgcctcctgggttcaagtgattctcctgcttcagcctcccgagtagctgggattacaggcgcccgccaccatgcccggctaatatttgtacttttagtagagacagggtttaaccatgttggccaggctggtctcgaactcctgacctcaagtgatctgcccacatcggcctcccaaagtgctgggattacaggtgtgagccaccgtgctcagccctccctgctactctttgaacacgagggcaccttcccacctccagccctttacctgctcccatgtttccttcaagtatttgctctaatgtcactttctcaacatggttttcccacctatacattggcaacttcttttcctcttcctcagccttattttcccttacttgttacgtactgacttttgttttgctgagacggggtcttgctgtgttgcccaggctggaatgcagtggcacgatcatggctcactgcagcctccacctccccagctcaagcaatcctcctgcttcagccttccaagtacctagtaccacaggcacccaccaccatgccgggctaattctttactatttgtagagtcaaggtcttcctatgttgcccaggctggtctcagtctcctggactcaagcgatcctcccacctcagccttccaaagtgctgggattctgactttggttttaattattgtctcttgcccctgacttgcaagtaagtgcctcgaggtcagggattttgccttcatgcttcctcggcccctagcaccgtgtctggaacaagatagatgttcagcaaacacttcgggagtggatatgcttgtaacatggaaataagaaccgtttctaactcacagtcttatgcagattcatctggctgaatgtgagctgctggtgactccagggagtctggctgggttcaaagaagttgggaaatggaagaaagaggaacaggtggggctgaaagctttattatatccaacagggtcgatacagatgacataggcctgggcttgctcatggaatcccacctggaggcaggttgggctggaagctgcaaccttccgcatggtggggagaatgctgcctcctggagaagggaagacctggaggcagcagcctggtttcctcctcccctgtcagaggattgtctcctgcttgacttggggcgtagtcttaggccctcagggagctatttcagacacccaccaaatatttaactcatttaatatttaccactctctaatgtaccaactgttattatccccccattttctagatggggaaactgaggcacagagcagggaagtcacttgtcaaaagtcacacagctaactcagggcagacctgaggtttaaacctcagcctttccagagcctgggtctttctctcttttctccctccctccctccttccctcccttccttccttccttcttttttttttttttttgagatagatctcactctgtctcccaggcaagagtgcagtggtgcaagttcaagtgattcccctgcctcagcctcctgattaactggggctacaggcacgtgccaccacttctggataagttttatatttttagtagagatggggtttcaccatgttgcccaggctggtctcaaactcctgacctcaagtgatccagccccacttagcctcccaaagtgctgggattacaggtgtgagctacagcacctggcccttttttctttctttctttatttctttcttccttccttccttccttcctttccttccttccttccttcctccctccctctctttctttcttcgctctcaaacttgccagctcaagcaatcctcccaccttagcctcccaagtagccaggattacaggtgcctgccaccacacccagctaatttaaaggaattttttgtagagatgagggtttactatattactcaggttggtattgacctcctgggctcaagcgaccctcctgccttagcctccacaccaggtgtgcaccagcacacaggctgattttttaatttttttgtagagatgagatctcactatgttgcccaggcaggtctcaaactcctgggctcaagtgagcctccaatttcagcctcccaaaatgcagattacaggcatgaggcactgcacccagcctgttttaatccttaaaaccactgagaagttgctgtcactctccctacaggaataaactaaagctcatgaagaggtgaactccttactctccaaagctgattttctgaaccatgaaatcttgtttctatgtgttctctgacacactttaaaaattacaaataaggccaggtacagtggctcatgcctgtaatcccagcactttgggaggccgaggcacgtggatcacgaggtcaggagttaaagactagcctggccaacatagtgaaaccccatctctactaaaaatacaaaacttagctgggtgtggtggtgtgcgcctgtagccccagctactcaggaggctggggcaggagaatcgtttgaacccgggaggcggaggttgcagtgagccgagatcgcaccactgcactccagcctgggcaacagagccagatgccgcttcaaaaaaaaaaaaaaaaaaaaaaaaaaacgctgggcgtggtggctcacgcctgtaatcccagcactttgggaggctgaggcgggcgtttcacctggggtcaggagttcaagaccagcctggccaacatggtgaagcctcatccctactaaaaatacaaaaattagccaggtgtaatggcaggcgcttgtaatcccagctactcgggaggctgaagcaggagaacccgggaggcggaggtcgcagtgagcagagattgcgccactgcactccagcctgggcaacagagcaagactctgtcttaaaataataataataataataataataataataaataaatagataaacaaataaaaattacaaataaaaaaaggttagaaaaagaaacatcagcatgtccactatagcattgtttgggagggtggagacacagaggccacccaggggttcaccccaggagaggtaaaccatgcagcagctagaatcaactattggaaacagtgggggccgggcatggtggctcagcccataatcccaacaatttgggagggtgaggcaagaagaatttttttttttttttttgagacggagtcttactctgtcaccaggctggagtgcagtggcacgatctcggtttactgcaacctccgcctcccggttcaagcgattctcctgcctcagcctcccaagtaactgggactacaggtgtgtgccaccacgtccagataatttttgtatttctagtagagacggagttttaccatgttggccaggctggtcttgaactcctgacctccagtaatccatccgcctcagcctcccaaagtgctgggattacaggcgtgagccactgcccccggccatgttctaaatcttgatagggatttggattgctcaagtgtgtgtattggttaaggttcatcaaagggcacatttacaatgtgtgtagttcattgttttaccttgaaagaaaaaaagtactgcgaataattattgggctctaattaatgagcccattattcatatcctgaagcatttagggggaaaacatgtctgcaatttactttgaaatgcaccaaaaaataagatggattgatggatggatagaggaatagagggatagatatgatttaaagtgagtatagttaaaggtggcgggggcatggatgttcatgtacaattctttttacttttctgtatatttgaaaatttttataatagaatattggggaaaatatgccccccacgaatggtatacacctggcaaaacaaaatcatagaaacaaaaagatatgcattatacaagacggcaggctgggtgtggtggctcacacctataatcccagaactttggggggctgaggctgggggattgcttgaggccatgagttagagaccaccctgtgcaatacagtaagacaaagagaaagagagagagagagagagaggagggaggagagagaaggaaggaaggaaggaataaaggaaggaaggaaggaagggagggagggagggaggggagagaaggaaaaagaaaagaaggaaggaaggagagagagcaaaagaggaagaggaaggaaggagagagagagaaagaaagaaaaaaagatggagtagggttgaaagagaatgtggagataaaaaggaattaatgattgaatgaacaaactaagaccccattggcctaatcagaacttacacccagccagctcacacccatgcagctgtgttgactgagaacacactgatgtacctccttctaattgataaacagcttctatcccaatccctcctctgagagcctccagcctccaggctcctccctgagaacccagatgaccctgattccatccatttcaaccatgcctgggagctacagctgcacttctgctggctgttccaagcctggaggtggccgtagcattttgaacatctggcgtgcggtgtggccgcatctaagtccaaggcactctgtccccgacagtcccgcttgagatccttacctgcccagagtccatagcttcagccagcctctcggggctcagctccaaggaggctcctggccttctgacccacgaggctagctccttctgaaatggggtggtaggcggggtggtgaggggagcccgatgggcagccgcgccctccccgcacccccgtctttgcactccttacacagagccgagtactggtcagcgccgtcaccttcagctgcatgaggctggcctcagccaggctggggggctccaggaggccccgtgacaggtccacacaccgcagcatagcaccgaggttcccctcataccacgcctcactgcccagccagcaggtgtcagggcccgaacagcaaagccccttcctgcgtcctcccagcctccctgggccctggctccctactcacccactcttggcagcagagtccggctcctcctcagtgggcactgccagcagtggtcggaggctgagggtccgcagctgctgcacgcagcccttcacctcctctgctgtctcaccagccacaaactgcccatagacggatgctcggagaaatgcgcctgagagccgggagcccaggagtcgccgagaccaggcctggagctgggtgacagggagcgagggctcagcgccaggctatgaggagcctccaggctggtcctcaggatcactgctcaccaacagcccgtgagtgacgagtgggggccaggcacacagccggagaaccagcaaggcccgtgtcagctctcctgtgcccttaaggtggaaggccccgccatcaaagctcagggactgccagcccctggaggggggaccagcttgggaacagagcacgtaacaggtccggagcatcctgggtccctggctgcctccacaccagggaaggttctctggaggcagcaagttcaccaactgccccttgcccagaccaggggcagtgactgattaactgggcaaagcctcaggatcacaggctccttgggggcaattaattattaacaaatggggacagagttcagagtaacggaaacgggaggtgaaccccagtaacagcccccaagaatgctcagcacaacagcctgcacttattaggtaaccaccatgtgctggggaaagcaggggctccggagcaaggatccctgggctcaggacaccgggctttgtgatccaggacaggctacttaatcacttttgtggcaattgcttcctcttaaaattggaaacgctgtagtgttattgaatacatttgaaaatacggttctcacgtttgtaatcccaacactttgggaggccaagaccgaggagtttgagactaccctgggcgacatagtgagaccccatctctacaaaaaatacaaaaattaactgtgtgtggtggcacacacctgtggtcctagctactcaggaggccgaggaaggtggatctcttgagcctgggaggtcaagggtgcagtgagctgtgattgtgccactgcactccaccctgggtgacaaagtgagactctgtcgccaaaaaaagaaaaaagaaaagacaaataacctatataacccagctgttccatgctaagtacatatcctagagaccttaaacatggacagcaggaaacatgtacaggaaagaatgttcagaggagcagtgtctgaactacccaaatgtccatcaaaaggagaatggatacatatatggtggtgtagttatgcaatggaatactatacagtaatgaaaaagaatggatactgatacacacaactgtgtggctgaatctcacaatgtcaagtgaaagaagccagacaccaaacagggcaagctgtattattcttttttttttttttttttttttttttttgagacacagtttcactcttgttgcccaggctagagtgcaatggcacaatctcagctcactgcaaccttcaccccccgggttcaagcgattctcttgcctcagcttccagagtagctgggattacaggcatgtgccaccacgccccactaattttgtatttttagtagagacagggtttctccatgttggtcagactggtcttgaactcccgacctcaggtgatctgcccgcctcagccttccaaagtgctgggattacaggcatgagccactgtggctggtctatacttttcaataaatataaaagcaaggaaagtgaaactgcagtaaaatgttgggaatacatgcgtgggtggtcaaactatgaggacaagaaaagtaaggacatgattatcacagaagtcagagaggtggttgattgtgggggatgggaggaattgtaatggggtagagggatatggggacttctatatcctattttctttttttaaaatggaaaccatatgtcttaatttttttgttttgttttgttagacgtatccttgctctgtcacccaggctggagtgcagtggtgcgatctcggctcactgcaacccccatctcccgggttcaagtgattcttctgctttagccccctgagtagctgggactacaggcacccaccaccacacctggctaatttttgtatttttgtagatatggggtttcaccatgttggccaggctggtcttgagctcctgacctcaagtgatccaccctacttgtcctcccaacatgctgggattacaggcgtgaagtcctaggtctttttttttttttttttttttttttgagacagagtcttactctgttgcccaggctggagtgcagtggcacgatctcggctcactacagcctctgcccccgggttcaagcaattatcctgcctcagcctcccgagtagctaggattacaggcgtctgccaccgcgcctggctaacttttgtgtttttagtagagtcacggtttcaccatcttggccaggctggtcttgaactcctgacctcatgatccacctgccttggcctcccaaagtgctgggattacaggtgtgagccactgtgcctggcagtggcttctaggtcctaggagtcctaggtcttaacatggatgatgattcatagttgttcacattgtaaggttttttttgttttgtttttgagacagagtcttgctctgtcttccaggctggagtgcagtggggtgatcactgctcactgcagcctcaaacttctgggctcaagcaatccccccacccaccacctccacctcccaagtagctgggattacaggtgcatgtgatcacaccgagggtaatttttaattgtttttttggtagagacagagtcttactatgctgcctaggctggtcttgaacccctggactcaagcagtcctctcaccttgggcctcccaaagtgttgggatttcaggcatgagccacggcacctggccctcacattgtaagttttttttttttgagacggagtcttgctctgtcccccaggctggagtgcagtggcgcaatcttggctcactgcaagctccgcctcctgagttcatgccattctcctgcctcagcctcccgagtagctgggactacaggcacccaccaccacgcccggctaattttttgtatttttagtagagacggggttttaccatgttagccaggatggtctcaatctcctgacctcgtgatccacccgcctcggcttcccaaactgctgggattacaggcgtgagccacactgcgcccggccttgaaatttttatttattttcttatttatgtatgtatgtatgtatgtatgtgtgtatttatttatttattcatttttgagacagggtctcactctgttgcccaggctggagtgcagtggcacaatttcggctcactgcagcctcaacctcccaggctcaggtgatcctcccacctctgcctcccaagtagctgggactataggcacatgccactatgcccagctaaatttaaaaaaatttttttttcctttcttttttgtgatgggggatctcactctgtcacccaggctggaatgctccagcatgatcatggctcactacagcctcaaactcctaggctcaaacaatcctcctaccttggcctcccaaacgctaagcttataggcatgagcctctgtacttggcctgccttttttttcttttctttttttttttggctccatcttgctctgttgcctaggctgcagatgtctgctcactgcaacctccgcctcccaggttcaagtgattctcctgcctcagcctcccaagtagctgggattacaggtgtctgctaccatgcccggctaatttttgtacttttaggagaggcggggtttcaccatattaaccaggctggtcttgaactcctggcctcagatgatccgcctaccttggcctcccaacgtgctgggattacagacgtgagccaccacgcccagcctagggcctcatccccagaaatgtgattactgggtaggcattggggtgttgaaagctcccctggtggttcaaatgttcacccaggtgaagaggcacggcccctacaatcggacaccttagcctctctaaatggggtcctccctccctctttgtcttttcactgtccctggaacacacccagcttcctgctgttgcatttccgctgttccttttccctgaaaactccacccttccttctttccctaattaactcccacctgccctcaggtgtcagggtttaagacaccccctcaaggaggtctgccttgagcagcccctcccagatgagggggagttttaccctttcacattttaacaccagccttgtagctcttgtcatgtttattcgtctgtgagtgaagactcagtttctctccccacgcccctgctagactgtgaacaccatgaggtcggggggtcacatttggttttgtcattaatttatccctactgcttaacacaggacttatttttgttgaatggacttatttttgttgaatgggtaactaatttaatagatttctttggtatttgctggacaagggacttatagattgcatcacatcaattcaagcagattctggataagacccacctttttttttttttttttttttgagacagggtctcactctgtcgcccaggctggagtgcacaatgtcggctcactgaaacctccacctcccgcattcaagcatgctcctgcctcaggctcccgagtagctgtgattacagttgcaggccatgaggcacacgccaccatgcccggctaatttgtgtgtgtgtgtgtgttttttttttttttaagtagagacaggtatttcacattgttggccaggttggtctcaaactcctgaccttgtgatccgcccgcctcggcctcccaaagttctgggattacaggtgtgagccaccgcgcccggcctcgaagtttttttgtttttttttttttaatgagacatagtcttgctctgtcaccagctggaatgcacggcgcgatctcggctcactgcaacctctgcctcctgggttcaagcgattctccacctctgcctcccaagtagctgggactacaggcgcacaccgccacgcccagctaattttttgtattcttttagtagagatggggtttcaccatgttggccaggctggtctcgaactcctgagctcaggcaatccgcctgcctcgacctcccaaacatggccttgggaatcgccatgtttgggtggacccagttgggtggcctgcatttgcatattaaaggttgccggcctggttctaagagctgctttaaaaacaaaaacctccaggccacgcctgtaatcccagcactttgggaggctgaggcgggcggatcacctgaggtcagcagtttgagaccagcctggccaacatggtgaaactccgcctctactaaaaatacaaaaattagccgggcgtgatggcgcgtgcctgtaatcccaactactcaggaggctgaggcaggataatcgcttgaaccggggaggtggaagttacagtgagccgagatggcgctattgcactccagcctgggcaacagagtgagactccgtctcaagaaaaaaaaaaaaaaaaaaaggtagaaattagagagtatagaagagaggcaatcttggaagaaataatggctgagaattttccagaactgatgaaaaatacatattcacaaagaagcaaagatatcttaagctagataaaacaaaagaggccgggtgtggtggctcgtacctgtaatcccaacactttgggaggctgaggcgggcagatcacgaggtcaggagttcgagaccagcccggccaaatggtgaaaacctgcctctactaaaaatacaaaaattagttgggcgtggtggcacgtgctggtaatcccagctactcgggaggctgaggcagaagaatccctcgaacctgggaggcagaggttgcagtgagctgagatcgcccattgcactccagccttggtgacagagtgagactccatctcaaaacaaacaaacaagcaaacaaacaaacaaacactaaagaaatccatgcctaaacacatcatactgaaatggcagagcattgaagctaccgaggtctattatttatctttgcatcctccagagtgtagcctggactagatgctccaccaattcaattacatcaagagggtgggtatcccaggttgagaccacagacaaattaaaggcaaggaggtagaaacaaatatggctataagaaggaaaagcatttttctcacctatctgaggcacacaacctggattgggggaaagtgaagttgaaaatgagagtgtgggagagggagagactaggtggagagaatttttgtttcgttttgttttagagacagggtcctgttctgtcacccaggctgtagtacagtggtgtgatcgatcatagctctcatagctcactgcagctttgaactactgggctcaagggatcctcctgcctcagtctcccgagttgctgggactacaggagtgtggcaccacagctgggtaatttttgtgttttttgtagagatggggtctctctgtgctgcctgggctggtctggaactcctggtctcaggtggtcctcctgtctcagcctcccaaagtgcttggattacagacatgagccacccacacctggtcactggggaatcctgagtgccctgcaaaacagaacacaatgggctgctcaacagtagccatggaaggttctggaataaagttcccagccggtccttctgtgggtgattgtccattttgtggtaagaggcaaaggggctctaacaccagcagagaggcagagccataggtgggagagtccctcttattctctctggttgggtcaccaggtgaccccataccaatcactgggattgaagaataaggtattccagccagctccagtgctgtgcctgtttctggagcttcaagagtgctcaaccaatgcacaaaacctacctggggcgtggtggctcatgcctgcagtaccagcactttgggaggccgtggcgggtggatcacctgaggtcaggagtttgagaccagcctggccaacatggcgaaacctcttctctactaaaaatacaaaaactagctgggggtggtggcaggcgcctgtaatcccagctaccgggaggctgaggcataagaatcgcttgaacccgggaggtggaggttgcagtgagccaagatcgcataactgcactccagcagcaacacaggtgcactctctctctaaataaacaaataattaaaaacaaaatgaaacaaaaaactggactcatgcgtgactctgatggttccaggaggtgatacatatacagaacatagaatgtgagctggcatgtgttaggagctcataaatgctgtctgtcactgctgctgcagcgactcattggcttcctgtcacccacaggataaagcacaaacccataagatgagctttgtggtttatctttggccatctcactagccttaattcctaccactccctgacttgggggttattctccagcaacaattttagggaaatcccttcccacactgtgctcctggagtcttctttgtctccagcccctgcacagctacttatcccttaatactggagtttggtgacagcttaggagcagaggacagtccagccagttttaatctccagcacagacctctctcctgagctctggaacccaatgtacacacacacacacacacacacacacacacacacacacacacacacacacacatgctcattcagaatcccctcatggattggttcttctcaaacgggacacgaccgcaccctggtgggagcttgggaaatttgcataattgtttttggctgcagcattgattggagggcattacaggcatctagaggcaggaccaggaatgctggacgctgaaatctgcatccagaacagtttgtaaatgtctttgcaggcgcttctgtgcgtaaaataagtttacagttatctgaaattattaatataacacatataccatacacacaaaattttggtatggtttaaaatatattgacattttctgaaatgaaactatgatgtaaatttatttttatttatctattttttttggagacagaatctcgctctgttgctcaggctggagtgcagtggtgccatctcaactcactagaacctctgcctcccgggttccagtgattcttctgcctcagcctcccaagtagctgggtttacaggcctgtgccaccacgcccagctaattttttgtatttttaatagagagggagtttcaccatgttggccaggctggtctcaaattcctgacctcaagtgatcctcctgccttggcctcccaaagtactgggattacaggcgtgagccactgtgcccggcttctgatgtaaagaaagtgaaaattgtgtacttttttgttcagaatggcaccaatggttatacatcatatcagaagaatcacaattccaacaatgccacctatgagatgtaatgtaaaattctgaatgaagtatagcacacataaagaaatgtgcccatatcatgtgttcagtatgaattttcaggaagtgaccagaaagtaaatttgacgcaagtgacacttgaataactaacacccaagtcaagaaaacaacttcgtaatcccagcacttcgggaggccaaggcaggaggatcgcttgggcccaacctggacaacatagtgaaactctgtctctacaaagataaaaaattagccatgtgtggtggtgcacacttgtagtcccagctacacaggaggctgaggtgggaggatcgcttgagcccaagagttggaggctgcagtgagccatcatcacaccactgcactccagcctgggagacagagcaagacaccatatcaaaaaaaaaaaaaaaaaaaaaaagaaagaaagaaaagaaaacaacattatgaggattctcaccccaagccttcctggtgccagtttcaatcaccatccccctctctcccaaaggtaaccagactctttgtttgtttgttgagacagggtctggctctgttgcccaagctggagtgcagtggtgtgatgatggctcactgcagccttgaattcctgggctcaagcaatcctcccacctcagcctcctgagtacttgaggctaccgttgcacaccaccatgtccagctaatttttgtattattttgtagaaacagggtttcaccattttacccaggctggtctcaaactcctggtctcaagcaatctacacatcttggcctcccaaagtgctgggattacaggcatgagccccggctcaggttatgcacttttatagtcagtagtattagtaacatgtggttgtatccttctcagtaatttttttttttttttgagacagagtctcgctccgtcgcccaggctggagtgcagtggcacggtgtcggctcactgcagcctccgcctcctgggttcaagcctcctgagtagctgggattacaggcacgtgccaccactctcagctaatttttatatttttagtagacacagggtttcacatgttggtcaggctggtcttgaactcctgacctgaggtgatctgctcacctctgcctcccaaggtgctgggattacaggtatgagccaccacgcctggccccttctcagtattttatatcagggggctccttgtgtcagtttgtcccatgactggtagcatcaactttgatcatctggtgaaggtgacatctgtcaggtttatccactgtgaaattactatttttccccaagtaactaatgcaatacatgctttttaggctctactaatttgagtttccaccccttgcaaattatttatttcctcctcagttaactaaagacctcattcaaactggtttaagagtgaaggacatttaggccgggcgcggtggctcacgcctggtaatcccagcactttgggaggccaaggagggcggatcacaaggtcaggagatcgagaccatcctggccaacacggtgaaaccccgtctctactaaaaatacaaaaaattagccgggcgaggtgacaggtgcctgtagtcccagctacgtgggaggctgaggcaggagaatggcatgaaccctggggcgcggagcctgcagtgagccgagatcgcgccactgcactccagcctgagtgacagcgagactccgtctcaaaaaaaaaaaaaaaaaaaaaagagtgaaggacatttatggttgcaactaactgaaaatgacattcagactgacctaagtggggagggaaactggtagtctagaagtagccctgacttcaggtgtggctggatccagtggcttggtacaactaggcatttgtcttgttcatcaatatctgtatagattaagggggactagatccggggaaggcagaagcaatagatgtccgctacactgaatcagaaaaaggagaggaggaagtaggaactgcatgaagagacccagccacagcctgcggttactttggagagcttcttccaagtggttcatggtgctgagcaacccaggacctggcttagcagcatattccttggccacagtggttggttccaggacaggcataagacccagcctgggctgatgaaagacagccccagagctttccagaactattggcataaagaggcactctggctgctgagctcatgggataccagcctagaactacaagtggtcttctctgtttcccaaataaagggtctacccgagaatgaagctagaccttgcatggctatgtttcaatactaggtctggcagtgtctgaagccaacgctaccccctgcaattgtcagctgcaagagccaacaaatttcctttcctgcttaagccaatgtagaatagaatgttctaggttttgcagggaatggtggctcacgcctgtaatcccagcactttgtgagactgaggcgggcagatcacttgaggtcaggggttcaagaccagcctggccaacatggcaaaaccccatctctactaaaaatacaaaaattaattgggcgtggtggcgcacacctgtaatcccagctatgcgggaggctgaggcaagagaatctcttgaaccaggaggcagaggatgcagtgagccgaaataacgccactgcactccaacctggactacagagtgagactctgtctcaaaaaaataaaataaaaaagaataaaaatacaaaaattatctgggtgtggtggcatacacctgtagtcccatctacttgggaggctgaggttcaaaaattgcttgaacccaggaggcaggggttgcagtgagccaagatcgtgccactgaactccagcctaggtgacagagataaactgtgtctcaaaaaaaaaaaaaaaaaaaaaaaggctgggcacagtggctcacacctgtaatcccagcactttgggaggccgaggcgggcggatcacaaggtcaggagttcgagaccagcctgaccaacatggtgaaaccccgtctctactaaaaatacaaaaagttagctaggcgtggtggtgggcgcctgtagtcccagctactcgggaggctggggcaggagaatcacttgaaacaaggaggcagaggatgcaataagccgagatcgtgccactgtattcgcagcctgggtgacaaagtgagactctgtctcaaaaaaataaaaataggccaggcgcagtggctcatgcctgtaatcccagcactttgggaggccgaggcgggcggaccacttgaggtcaggagttcgaaaccagcctggccaacatggtgaaaccccgtctctactaaaatatacaaaaattagccaggcgtgatggcaggcgacttaatcccagctacttgggaggcagaggcaagagaaccgtttcaacctgggaggcagacgttgcagtgagcagagttcgagccattgcactcaaacctgggggataagagcaagacttctctcaaaataataataataataataataataataataataataaaaaataaaaacaaaaataaaaaataaaaattaaaaaagaatgttgtaggttttttctttgaaaaggaaaaatatacaattacatgttgttggctgtggatttatttgaaacaaaaagaaaaaatatacaattagaaaaattctactgttagaaatgaagtcaccttttaattacagggaaatcatttagatcttaatgtgtttatgtattccagtgctgtggtgtaaaaacttattttagtctgtgctgataaaaaataacattgtcatacaacaattggggtgtatttgtaaaaaagaaaacaaaagaaaaataaatatattgacaaacacgtgaactagaaagttttgataatatggttaatcaagtagaagtgtggtctgaagaaagtctgttcttcatggaaacaggtgggcttctcagctatcctgctattcaatagaaagatggagccaggcgtggtggctcacgcacacctgtaatctcagcactttgggaggctgaggcgggtggatcacttgaggccaggagtttgagaccagcctggctaacatggttgaaaccccatctctactaaaaatacaaaaaattagccgagcctggtggcggccgcctgcaatcccagctactagggaggctgaggcaagagaattacttgaacctgggaggtggaggttgcagtgagctgagatcgtgccattgcactcctgggtgacaaagcgagacaagaaaggaagggaagagaagggaacgggaggggaggggaggggaggtaaggggaggggagggaaggggaggggaggggagggaaggggaggggaggggagaggagggaaggggaggggaggggagagaagggaagggcagcggaggggagagaagggaagggaagggcaggggaggggaggggagggaaggggaaagagagagagagagacagagacagagagagagagaaagacaggaaagaaaagaaggaaggaagggagggagggagggagggatcctcttactgggctgttattatgaagcctgtttttaaaatcacttttattgagatatcatttatgtacaataaaaatgcacccatcttaagtgtaaagttcaatgagttttgacaaatctgtgcacccgtgcaaccaccaccacaatcgttatatagaatatttccaacacctcagaaagttctcccatgcctttttgcagtcaaccctcctctcatggccccaggaaacctctgctgtgctctctgccaccgtagattagttttgcctattttagaatttctataaacgaaagcacacacacagtacatattcttttcctctagcttcttttgattgtctgtttattttaatgcttatggagcatacttatgtttacatgtgtcatagtttatgcctcctgtgttagataactgtcggaaataataaaataataggtaggatgcaacatggattcataaattccacttattattagctatttcagacgtcatggaatgcaaaatgaacagagtttttcatatgtctttccccacttctgaaaactttacttcatgaagcacttagggaccctcagaatagcattttattttttatttttattttatttttattttttgagacagaatctcgctctgtcgcccaggctggagtgcagtggcgtgatctcagctcactgcaacctccgcctcctgggttcaagcaattctcatgcatcagcctcccaagtagctgggactacaggcatgcgccactactcctggctaattttttatatttttagtagaaatggagttttaccatgttggccaggctggtctcgaactcctgacctcaggtgatccacccgcctcagcctcccaaagtgctgggattataggcgtgagtcaccgcacccggcagcatttcatttttgagacgacgtttacaatctgccctgtccttttggagaagtttagtttctaaagccaaccccaggatgcaccttgtttctactctggtaccagctgaaccatctctgtcactcagccccctccatgtcctctcctgacaccaagtccctttgggttttatggagctcacctaaccagctcggcccaggctgtaatgagagagaccagtggagtgtaaattcctgcaggtgcaggacaatggggttgagagggctcttacaccagatgtcccctcagctcgaagggcagagaatcgggttccagagtgtccaagtctccggccacctggtcatagattcctcttggatcctgatatgtgtcttcaggccagtggaggtcccagggtccctgacaggcaaaaagtggagttagaaccatggagagatgccctgtaggtcttcattgaagatctgggggatacatgcccctgcttaacttcccagaaaaaagtgttttagcttttactaaaatcccaacatatacaaaaaaggagtgtgattataatgaatgcttatgatgaaccccatgtgcttatcacctaacttcaacaatatcaggctgggcacggtagctcatgcctataattccagcactttgggatgccaaagcaggaggattgcttgagaccaggagttcgagaccagcctgggcaacatagtgagatcctgtatctacaaaaaataattttatttttcttagacagggtctggctctgtcacccaggctggagtgcaatggcacgatcttagctccctgcaacctccaccttctgggctcaatccatcctcccacttcagcctcccaagtagctgggactacaggcatgcatcaccacacccagctaacttttgaattttttttttttttaaagacgaggtttccattgtggcccaggctggtcttgaactcctgagttcaatcgatccacccgtctcagcctcccaaagtgctgggattataagtcactgggattatgagccactgcaccgagcctataaaaaatatttttaaagaaattagctaggtgtggtggtgagcgcctatagtcctagatactcaggaggctgaggtaagaggatcgcttgagccccggaggtcaaggctgcagtaagccatgatcatgccactgcactcccgcctgggtgacagactgagactatctcaaaaaaagaaaaaaagaaaaaagaaaaaaccagtagcaacccttggtcaattgatttctctgtatttctatcttgttcccctccccgactaactggattattttgaagcaagcccaagatacccaatgatttcatgttagaaaaataatgtaaatgtcagaaatataaaacctttaggccaagcatggtgactcatgcctgtaatcctagcattttgggaggccaaggcaggtggatcacttgagatcaggattcgagaccagcctgggcaatgggcaaaaccctgtctctactaaaaatacaaaaattagccgggcatgatggtgcatgcctgtaatcccagctacttgggaggctgaggcaggagaatcgcttgaacctgggaggtggaggttgcagtgagctgagattgtgctactgcactccagcctgggttacagagcaagcctccatctcaaaaataaataaataaataaaatttttaaaaatgaaaactttaaaagtccatgttatcaggtatggcaactgtggaatgtaagttatgattatattgtcctatgaatttccaaaacagttccctaatcataatagaaaaacaaaacaaagcaaaaccaaacaaacaacaacaacaaaaagaacatgaatggtagccctaactggggatgtattttgttctagggctgggagaaaatgattattttagttcagcaaactttagagcagattggcccatgctccaaatatggcctgccacctgcttttttatactgcccaagagctaagaatggtttttatttttttctttttctttttctttttttttgagacggagtcttggtttgttgcccaggctggagtgcagtggcgcaatcttggctcactgcaacctccgcctcccgggtttaagcgattctcctgcctagcctcccgagtaggtgggactacaggcgccagccaccacacccggctaactttttgtatttttagtagagacggggtttcaccatgttggtcaggctggtctcaaacttctgaccttgtgatccgcccgccttggcctcccaaaatgctgggattataggcatgagccaccgtgcccggcctggtttttcattttttaattgttgggaaaaaatgaaaaaagataacatttgtgacatagaaaaattacatgaagttcaaattacagtgtccaaaaattaagttttgtaggaacatagccacactcattcatttatgcatcgtctatggctgcttttactttacggtggcagagtttgtgtagagtttgaggaagaccgtatgtcccacacagcccaaagcatttactactatccggccctgttcggaaaaagcgtgcagcctccatctacgctttagagagtgcatatggtccagcaccatggacagcgctttgcgccatgctggtgaggagctaggatctgacaacagtcccggtatcggaggtcgttcacagagacagaaggaaatccttggcccaggaggtgccagagcatcagccaaggccacacaggaaatcaggggttctgtcccatctccctaactgtgcagcaatgggtggggattggctggtggtcaaagtgcctgtctgttgtttttgcctgtacagccaccatcctcatttccctgtgagctctctgtccctctcctactctcagcccagtgacctgagtggggctggcccctactccctgatcccatggtgaactggcccaggcctctcctgttagcatattccatcccctgactcagggatgtgttcagtgatgaggatgtgacccaagctagaccaattaagtgtcagcattgggcatttggggccactggaaaacaggtatactctttctttgaagatttctaatctcgtaggatacaaatctagattttctgggaatattttttccctttcttttttgaaacagtctctcaggctggaatgcagtggcacaatcagggctcatggcagcctcaacttccctggctcaggcattcctcctacctcagcctcctgagtagctgagaccacaggcatgcaccaccatgcccagttaattttttaaactttttttttttttgagacagagtcttgctctgttgcccaggctggagtgcagtggcatgatctcggctcactgcaacctctgcctcctgggttcaagcgattctcctgcatcagcctcccaagtagccgggattacaagtgtgtgccaccacatccagataatttttgcattttttgtagaaatggggtttcaccatgttggccaggctggtctcgaactcttgacctcaggtaatccacccacctcagcctctcagagtgctgggattactggtgtgagccaccatgctcggcttaacttttttttttttaaagatggggtattattgtgttgcccaggctggtctccaatacctgggctcaagcaatccacctacctcagcctgctgagattagagatatgagccgtgaccatgcctagccataaaaacatttttagggaagaaattctgggcccagctgggcctgatgacaattgtatgccttgatttttcagttgaatgggcccccaaattctctctttctctctctttaaccagtggagtagatatggctaattatctttaaaaattcatgtctacttccttccacagtagcagaattgcagcaaggcacatcactgctaagctagaccacatttcacagcctcctttgccgtcagatgtgaccatgtgactctcttcccaccaggggagtgagagcagagtggtgtgcaccatttctgggcctgggccacaaggcagggttgtgcctcctccacattctttcaccttttcccatgggttgaacccccagtgaactggctcattcatgtagactcggttgacttgagcagggccactcacgtctgactgaaaaagaaatagactgccttctttttttcagagacagggtcttgctctgttgcccaagctggagtgcagtggcaccatcatggctcaccgcagcctccaactcctgagctcaagggatcctcctggctcagcctcctgagtagctgagactacaggtgcacacctccatgcctggctcattttaaaaaatgttttgtagagacaagtcactatattgcccaggctcgtctcaaacttatgggctcaagcgatcctcctgccttggcctcccaaagtgttgggattacaggcatggaccatcatgcccagccgactgtctttaagccactggatcatggtcaggcctctttgttacagcagctagctggccctaactaatacaagcaataggaggtaggctcccagcactagccaggaaggatggttgctgatgcaaagcttctcaccatctgcacttcatcgtagaggggtccccaggctccagacggggggtacgttctttctacctcatcatacaagtgcccagggaaggccatatcctcatcttcacctgtgaaacctggagttggagtggaagggagacacgatcaaggcacccagtccaggcgtcgggggtacctctgagtgagggaatcctgacatggtcctaactcacctcgggaataagacacctcctcctgcgtcgggggcagctgggggctgaagtccctcagggagcggtaatacggctctgcctctgttgtgctgacctgttccccacacgcaaaacaaacaaagccctttccatcctctgaccccactgtgcccggaagggcaatgatcaacctgatgctaacggcagggcttcagtcgccgtcggtgccctgattgtggggtcaccagggccacccccacttaccgtggagctctgagtgtcccgctctcctgtccactggctctcctcatattcgttcctgactcggtcctcttccgaccttccaggatgaaggtgtggggggaagttgagtgctgccccccgccaccagtctcccccaaacctccctcagagccttctttacagaaaaatatccccacttaccctgcctctgtcttctctgagatgcctgaaggaaacaggaataaagggctcagtgaccctatgcaagccccccaccccggccccaggaagaccttcagtatgcagcaaccacagggttccctatcaccctcgggtctccaccctggcagggaagggtctctcctcaccctcagcaagacgcctgagtctccgctgccagaggacccccccgacacaggaggcattggagaggagcagaagccccccaagagcgaacagcacaggcagcaggggcagccccgagggtcctaggggtggaagatacccctcagtgaatcccagacaacaggctgtaggccaggggtgggtctccccgagaaagtgtagccctgaccaagtccctcccccagggtcagagaaacagatgggcagaggtctctgtgcccaccctttctgcccacccaagggcaggtggcttctttcttaagtcaagccattagcaaaacttcctccgtttgcttgaactctgcaaactcagaacggaactctggactcaggagggagcttcagctcgttagctgggcactgaagactttctgtggtccagcctcttcccacgcctccagccatgcccaccaaacttagaccctggtactggactgtccagccacacaaatcaaccaccagctgtttccagaatcactgaagcaaattcacacctcagagctttggaatagttaagtgtctgtcctcaaatgtcctttcttctcaagcaaacttctgtttgcctttcaaattctatctcaaggtcaggcgctgcagcacatgcctgtaatcccagcatgttgggaggtcaaggtgggagaatcgcttgagcctaggagctcaagaccagcctaggcaacatagtgaggctgattctttacaaaaaaaattaaaaatttagcagcatggtggtgcatgtctatagtcccagctactcgggacactgaagcaagaggattgcttgaacctggtaagtcaaggctccagtgagctatgatagcaccactgcactccagcctgggcagcagagcaagaccctgcctctgaaaaaaaaatcccatctcaaggacttctttattttattttgttttttaattaagacggagttggctgggcacggtggctcacgcctataatcccagcactctgggaggctgaggggttggatcacaaggtcaggagttcaaaaccagcctggccgatatggtaaaaccctgtctctactaaaatacaaaaaattagctgggtgtggtggcaggcacctgtagtcccagttacttgggaggctgaggcaggggaatcacttgaactggggaggcagaggttgcagtgagccgagatcacgctactgcactccagcctgggtgacagaatgagaccctgtctcaaaaaaaaaaaaaaaaaaaaaagagtctcactctttcacccaggctggagtgcagtggcatgatcttggctcactgcaacctccacctgcagggttcaagcgattcttctccctcagcctcccaagtagctgggattacaggcgcatgccaccacacccggctaattttttttttttttgtatttttaatagagacggagtttcgccatgttggacaggctgttcttgaactcctggcttcaagtggtctgcccaccttggcgtcccaaagtgctggcattataggcgcgagccaccgtgcccagcctcaaatgacttctttccaccaacttccatcccagccaatatcaggctgacttggctgctatatccctgaggacaaggctgaacccctctaagtaggcatctgttgggcgggcaatctcccctgtcttctactaatagcacttttttcccctggggagaacagccactccccaatctcagtcttgggttcaggcaggactccacagtgggcacatggcccggcctggaaaataagagtctccattcctctctccacagtgattgtttagacacaggcatttgacccaacgtgtgtttttaacaaaacatttaggacaattctactagctgtcaagaagatggaggtggaggagggcttctctgcccctctgattgaagaaactcagaaagaagccaccacagatgaaggcaaagttgagagagggtgagaaacagatcgctggtgagatttttgagcacctgaaagtggccacacttggaattttttatttcatataccaagactttttcttttttttcttgagacagggtctcaactctgttgcccaggctgcagtgcagtggcgtgagctcggctcattgaaggctcaacctcctgggctcaatcaatcctcccgcatcagcctcctgagtagctgggactgcaggcatgcactgccatgcctggctaattttttttgtttttgttttatagagatggggtttcaccatgttgcccaggtttgtctccaacgtctgggctcaagtgatctacctgcctcagcctcccaaagttccgggattataggcatgagccactgtgcccagccaagccattctttttcgtgttgacaaaacagctgcatttctgtcacttgcaacctttttctcgggctctgaaggggatttttttgccaaatggttgcaatcatctcccagtagtcacatccttgagtgcggggcctttccacactgactctgtgttgagccatgtgacttgctttggccaatgagacacaactatgacggaatcagctagtaaattgctgcttttgacccccgtgaccacctccatgtgaaaaagtcaagaagagacacgcgcccagttatctccattgttccaaccaagagccagatgactatcagaagtgtgggaagggggcaaccctagaccacccagtccagtggagctgccagctgactgcagagatgatttaagccagcccagaccagcactgttccgccagactcagaatcatgaggaagaatgttgctataagcacccatgtttggggtggttcattatacagcaaaagctaactgatgcaggcttcttacaggacatggagtgagctaattcttacggaattaaactaaatttggaagagaagaaaatttatcactccaggcaagaggaagatctaagaaaaaaaaaattggccagatgcagtggctcacgcctgtaatcccagcactttgggaggctgaggtgggtgaatcatgaggtcaggagttaaagaccatcctggctaacgcggtgaaacctcatctctactaaaaatacaaaaaattagctgggcgtgttggcacgtgcctgtagtcccagctactcgggaggctgaggcaggagaggaagccgggaggtggagatagcagtcagccgagatcgcaccactgcactccagcctgggcaacaaacagagcaagaatccatctcaaaaaataaaaaaataaaaaaaaaaaatgccgagtgccgtagctcatgcctgttatcccagcactttgggaagctgaggcaggcagatcacttgaggtcgggagttcgagaccagcctggccaacatggtgaaaccccgtccctactaaaaaagtacaacaattagccaggtgtggtggcaggtgcctgtaatcccagcaactcgggaggctaaggcaaaagaatcgcttgaacctgggaggtggaggttgcagtgagccaagattttgccacttcactccagcctgggcaacagaatgagactctgtctcaaaaaaaaaaaaaaaaaaaagaaagaaagaaagaaaaaagaggaagctctaaggagtctgcaagtctgcaattctgcagggacagaactaagtcttttttttttttttttttttttttgagatagggtctccctctgttgccaaggctggagtgcagtggctcagtcatagctcactgcatcctccaactcctgggcttatgcaatcctcccacctcagccttctgagtagttgggactacaggcacatgccactacacccagctattttttatttttgcaaagatggagtcttgctatgttgcccaagctggtctcaaactcctgggctcaagtgatcacatgccttggcctcccaaagtgttgggattacaggcgtgagcgactgagcttggccagaactaagtcgttaagcagctgtgactacaagcagaggaggtagggtcagagaccaggaggttccattctcaggggagccgggagggatcaggggactgaggacttgcctgaaggtggctctgtgggcagctggtcttcaggttctccagaaggctggtggagacctggggggtggatatacagattgtgacttaacactaagaatctgagataagctttaaatatttctcagcctcttcttaagcctattagattcatgggaactggtatatgactgcttaagaatatttcaaagagagctagaaattgctgataataatgacaatactattaatagcaattctaatggtaacgctaatgctaagaataatttgttttttgagactgaacctctctctattgcccaggctggagtgcagtggcgcaatctcagctcactgaaacctctgcctcccgggttcaagcaattctcctgcctcagcctcccaagtagctgggactacaggcacctgccactatgcctggctaattttttgtatttttagtagagatggggtttcaccatgttggccaggctagtctcgaactcctgacctcgtgattcgcccacctcggccttccagagtgctgggattacaggcgtgagccactgcgcctggccatttttttttttttaaagagacagggtctcactctgtcgctcaggctggagtgcagtggtatgatcatagctcactgcagcctcgacctcctgggttcaagctatcctcccgcctcagactcctgattagctgggactacaggcatgcatcaccatgcctggcccaaaaattaactgttgatgagcactttcggtgtgcaaggtccttttcacccgaattatcaatttgttgagttaaccaaaaaagactttgggctctcgatcccttaataaaggtacaagttctaaagcaaaggaggcaagtgtcatactttatgttttagtgttcaaagggaagactggagtggggtggggggaagagcagagaagattgtaggggtgaaaaagtgtccttacttccattgagaaaaagcctgctctgtcaggaagaggaaaacagaaaggagaagcttgcggccaggagtggtggcacacgtctgtaatcccagcactttgagagactgaggcaggtggatc

SEQ ID NO: 231 - DNA, 38374 bp, Homo sapiens; identical to SEQ ID NO: 230

SEQ ID NO: 232 - DNA, 149480 bp, Homo sapiens
aagcttgcatgggtagcatggacagttgacataaaacacagccttaaatcttattttagtcatttgtctgatctttaccacctccaaattgttggcagaagctattagagcaaatttaactgagttcaaatttcacttcctatattctacttattttctgaaaggaggatgaaagaaatgcaaaaacagaagattggagatgagagcagggttagtcacaaacccagttcatatcaagaaccaatgttgagattactgagatctgttgtaattttttaccattcccaatagtaataagaatttttttctcaagaattacttattaaaatatgggcagacatcagtgatagactggataaagaaaatgtggcacataatacacgatggaatactatgcagccataaaaaagaatgagataatgtcctttgcagggacatggatgaagctggaagtcattattctcagcaaactaatgtaggaacagaaaaccaaacagtgcatgttcttgccttataagtgggagttgaacagtgagaacacatggacacagggaggggaaaaacacacactggggtctgtctgtcggggttgggggaaggggaggaagagcattagaacaaatacctaatacatgtgggggcataaaacctagatgatgggttgataggtgcagcaaaccaccacggcacatgtatacctatgtaacaaacctgcacgttctgcacatgtaccccagaacttaaagtataataaaatttaaaaaataaaaaatatgggcagaatgtgtagcaattttctagcctcagctcctgcttattcacccttattataaattaatgcaggtaaccgttgcccacatcaatgctactgcaaagaatgccgctgatgataaactgcggcagagtctccgcagatttgcaaatacacacactgctccagccacagtggttcttgtgtcaagtaagtacagaaacatctgctaatttcagctaaactcactgtgtgggaaattatcatagaagccagcaacatgtgaaagtaaaatgtatccccaaagaggctgaagtacatgagacatgtttatggttattgttgagaactgtttagaaaaaaaattgggtctaggtggatttctgtatttcctccttggaacttgagttattgtgggaccaggtttattttttattttatttttttgtttatttattttgagatggagtttcgcttttgttgcccaggctggagtgcgatggcgcaatctcggctcactgcaacctccgcctcccaggttgaagtgattcttctgcctcagcctcccaagtagctaggattacaggcatgttccaccacgcccagctaattttgtatttttagtagagatgggggtttctccagttggtcaggctggtctcaaactcctgacctcaggtgatccaccctcctcggcctcccaaagtgctgggattacaggcgtgaaccaccacgcccggccgggaccaggtttattaaagaaaaatgtgatttttttttttttttttaccttgtgctcagtattaataatttttaaagtttaagttaattttcaaatttgagtctccccaacatatttgctcctttttaatactgaaagtaacatatgtgtcttggaattcttttggtaagattgtcttacattcttctgatgtgaaacgtgtttctttcctaagaaacgggggaagcaattttgaatatagtccagcctttcctttcttctcagtgggtgtcaatagagttgtctgtctttgtcaagtgtttctaatgtttggggatggggttggtctgtaccttttctttcagctgatgtcaattttgcattggaacttagtgacctgagacacaggcatggtttccacattattttggtccataaaaaccaggcctcagaagcactgctgcatcatgctaacgagctgatcagatttgaagagttcatttccgacttgccccccaggttaccactaaaaatgccagtaagtgggtttgcgttatttttgccattttccaatattacattgtggaggctgaaagacagcccataataagggggttgccaggcccagatggggctgttctttgtaagaggtgggttagattttgaagtaaggcttagaaaccttcggttcttctcacaaatatacagataattggtatgtatgaagtttgcttttatttatttcaaaatatcatatgaaattgacttgtagatttaccttcccaacttgccagtgtcttcaaagctagcagtgttttgtgtcaggtggatagaaataacggattaaaagtcatgattctttttgcttccaagtattatgggtagagaatatggcgagggttctcacatacttgtgtggttggcaccaaataagtggagtcaattgtgcatttttttcggtatttaatccttaagcttcagcgggcctctgagtctgtgctttctattgtgcattccctgtggtgcatggacacaattagcaggagtggttattgctccacctgtgtgtagcctgtttatgccatatactgggaggagggtgtgagcacatttccaggactagcatttctgatagacttgacttgggataagaatgtttattgcagtgctgggctgtgtttaagccgctggcgaatatgtgtgtaactctgaaagaattaatgataatggagaaggagccatggtgtgggtgatccaggagagtgggcaatcccatacgttaaatgaaagtcttcacatataatttaataactgagagttacagaagtacgttagacatgatctcatgcaaagtcttcatttaagggagaaagaaatcagctcttagaaaaagtaaacgtgtcattggtgattgcagcagttaagagagtgggccccgggtatcctgattccggcacttgcctgctagtcacctgtgtccccgatacccaacaagccccctgcggtctggcttaagttgaaactcatgctatggacagttgagagttgtggataccagaggcttacccagggagtaagcatatacaggccttaccttaatcttttgaggctctttcctaactcacctttgtcattatttgtttttagtcacttggctgtagttacatttcttcccttctgcttctgtttgacggtcacttttctaactttgaaggccttatgtaaatacggtgttttttcctgggaggtgaaggttgcagtgagctgagatcgcgccactgcactccagcctggtcgacagagcgagactctgtttcaaaaaaaaaaaaaaaagtaaatgtagtgttttaggtaagaacttgcccactttggagattcttattccttatggttaaaaaaaccaaaacaatgttttgataattcaaaccatttagttttgctggatgttttttcccatccactagagtgataatttaagatacatttctttttatgttctttagtctgttcctttaattttaataaattaaacatacattggtactgcctgggttttgagtcccaggtgtaataggaaaagtgtagattttgttgataattggtcagtacccctcaaataaaaagaaaagcctctgattagaaaagtatggtgtgggccgagtgatgtggctcacgcctgcaatcccagtactttgggaagctgaggtgggcagatcaccaatcacctaaggtcaggagttcgagaccagcctggccgatgtggcgaaaccccatctctactaaaaatacaaaaattagccaggtgtggtggcgggcactggtagtcctagctgcttgggaggctgagacaggagaatcacttgaacctgaaagtggaggttgcagtaagccgagatcacaccactgcactccagcctgggtgacagagtagactgtgtctcaaaaaatctaaaaaaaaaagaaagaaaagaatagtatggtatgatcattgtaaaaacaaacaaaacacaatatttagaaatgtggaaagtgaaaaccccacaattctaccctccagaagtaaccactgttaatattttggtattgccctccagatttaaaaaatgtacgtttaaaaaaaaatgtgtcacatatacagtgttctgtggcttttggaaaaaaactatgtcagagcttggatgtcttttcatgttaatatatattaatataaatctgccacattttaaaaaccagaactttggtttgaaaagtacttgtatggctggtctttatttaaccagtctacctgttagtggacattttgtttatacccagttttgtgttttgttttgttttttaccatttccagcaaggtaatttatatctttaggctcctgggctgacataccatagggtaatttccaaggcataagagttctgggttagaactttactagcaagatccatgtcttcctccaggaaggtggtactaatttacactcataagagtgtctgttttaaatgtttgccaggccagtaagtgaaaaacagcatcatcttataattgacttttaatctttaacacagtgcaaaatatccttttatgattatcgttgtttgctttttatttcttctgtaaattgttcacatcctttgcctgttgttagtgatttctcttatggtttctggatttaaccctttatataattatcttaagttttctcctggtgctttaatggttctgctttttaaaatattattcttatttaaaaaaaatttttttgagactctgtcacccaggctagagtgcagtggcgtgatctccgcttactgcagactccacctgccgggttcaattgattctccttcctcagcctcccgagtagctgggattacaggcgcccgccaccacgcctggctaattttgtatttttagtagagagggggtttcactgtgttggccaggcttgcctcgaacttctgacctcaggtgatcacccgctttggcctcgcaaagtgctgggattacaggcgtgagccaccgtgcccagcctctggctagttttttgtagacgaggtttcaccatgttggccaggctggtcttgaactcctgacctcaagtgatccacctgccccagcatccctaagtactgggattagaggagtgagccacaatgcctggcaatttttaaaaatttttaatagagatggggtctcactgtgttgctcaggctggttttgaactcctgggctcaagtgatccccccgcctcggcctcccaaagtgctgggattacaggcatgagccaccatgcctggccagttcgttcgttcgttcgtttgttcgttctttctctctctctctctcttttctttctttttctccagttctacttccttctttctttctttcttttttttttttttttcacagaatctcgctctgtcgcccaggctggagtacagtggtgccatctcagctcactgcaacctccgcctcctgggttcaggcaaattattctgcctcagcctctggagtagctgggattacaggcgtctgccactttgctcagctaactttttttgtatttttagtagagatggggtttcaccatgttggtcaggctggtcgccaactcttgacctcaggtgatccacctgccttggcctcccagagtgttgcgatgacaggcgtgagccactgtgccaggccaagttctacttcttaatacataaatttcaacttatctggaagaattatgactacccactgccaaataaaacttccagcctaactactggcaatctgctgttgaagctgaacaggctctaaattgttgggttttaaaaaaatttttgtttacttaagcctatagctcctagtattcccaggcattctcctatgcaaaaaccaaccaggactgaccctgctcaccttctggctctataagttattattcagcagacctgcagaataaatagacttttaaaaaacaacttcgttgagatatgatttacatattacaaaattcagctcttttaagtgtacaataatttttagtaaattgagttgtacaattttagaatatttttgtcacctcagtaaatctattatgctaatttataattaatccccttccccactcccaggcactactaatctttctgtctctgtagatttgtattttctggatgctttatagaaatggaatcatatagtatacagacctctgtgcctagcatattcttttttatttttattttttgagacagtgtctcactctgtcactcagagtggagtgcagtggcacagtcactccagcctcaatcttcctgggctcaggtaatcctcccacctgagtagctgggactgtaggcatgcaccaccatgcccagctaaagcatattctttaaaacaatattcagttactttgtcaacactaaataatttaccctctcccatctaaatcactgtcatcttctcttcaaagttgttaactgaagtttggaggtcacccattgttcttattttgaaattgaatgtgtgcccttgaattaacctgacgtaacacttctttcctctgtattagcagtgccacactctgctctatgtttataacctaccagcaaataaggatggcaagagcgtcagcaacaggctcagacgcctgtccgataattgtggtgggaaagtgctgagtatcacaggctgcagtgcaattctccgcttcataaaccaagatagtgcagagcgcgctcagaagcgaatggaaaacgaagatgtctttggtaataggatcattgtgtcatttactccaaaaaatagagaactctgtgaaacaaagagttcaaatgcaattgctgataaagtgaagtctcccaaaaaacttaagaatccaaaattgtgcctcatcaaagatgcaagtgaacaatcttccagtgccaaagccacgcctggaaaagggtcacaggcaaattctggatctgctacaaaaaatacaaatgttaaaagtttacaggtaattttgatacctcttgctttctgaagtttatggtaggtttggtttgtttctgtgttttacgtgcccgcttgcttttggcgtgtccctttttgatttcagtgtttgatgatactcaaagtcaatcgttttctgtaaaggatctaacacatcttgggtacttaaaatttaaaccccactgtgcttgtgtctttgaaggagctgtgccgcatggagtcaaaaactggtcatagaaacagtgagcaccagcaaggtcacctgaggctggtcgtacccactcacggtaactcaagtgctgcagtgtcgacgccgaaaaactcgggggtggcagaacccgtttacaaaaccagtcagaagtatgtgaaactactctttctcatagctgcttcttgaatgtgaaggaagacatatgaccttttgccttcaattttccccttctgttagaaaggagaacctcagtgcccgaagtgttaccagttctcctgtagagaaaaaagataaagaggagactgtattccaagtgagttacccgtctgcttttagcaagttagttgcatccaggcaagtcagtcctctgctcgcatctcagtcttggtcttctaggtgagtccagcttcttgacccatgggggtggttacatgtaataggaaggattatgaaatagtatgtttgttgaaaagaattcagatagtactgaaatgcacaaagtaagtctcccatcactcttctgccagtccccctctcctcaggtaatcatcgttaacatttaggggcaatgctttcaccatttcttcttcctccatctggaaattgtggtaagcagaggtcagaaagagaagcctgttggagagtccctggccagtgcaggggggcatgtaaagatgtccctatgttcgctgtgttgaggaaaaagcccaaacgagccgtgcattggtggttctgattcatatggttctgtataggaagctatttggaagtaaagttttctgtaaaccatggtaattatttatcactgtctctcacaccaaggaattcttgatgcttgggagacagagaagccgtaaggccgtgttgcattcccatgagctccttttagcattgtgtttgttctgctgagttggtggcagatcactgtagaaagtgactatggatcagccgggcgtggtggctcacgcctgtaatcccagcactttgggaggccgaggcgggaggatcatgaggttaggagatcaagaccatcctggctaaccggctaacacggtgaaaccccatctctactaaaaatacaaaaaattagccgggcgtggtagtgagtgcctgcagtcccagttacttgggaggctgaggcaggagaatggcatgaacctgggaggtggaggttgcagtgagctcagatcgcatgactgcactccagcctgggtgacagagcgagactccgtctcaaaaaaaaaaaaaaaaaaagagaaagtgactatggatctataaaattacatctaaaaagccacataaaagttttccttatgtgcagaaagaactgtaacatgtaggcaagaacgtttaactctttcagagacacagaggaggttagacgccttaaattggtatcacaggctgatttcctaaggataatgcacaaagcagaaggttaattcatcaggactgcctctaattcctgcctttagctttaacccaaaggaagaatatatattaattggttggcggtaattaggggtcagtagatagtacttttgacaatgtctgaaatcaatgtgtatttaagattaaaaacacagctgggcacagtggctcacgcctgtaatcccagccctttgggaggctgaggcaggtggatcacttgaggtcaggagtttaagaccagcctggccaacatggtaaaaccccatctctaccaaaaataaaaaaaattagctgggtgtagtggtgcatgcctgtagtcccagctactggggaggctgagacaggagaattgcttgaatccaggaggtggaggttgcagtaagccgagatcgtgccattgcactccagcctgggtgacagagcgagactctgtctcaaaaaaaaaaaaaaaaaaaaaaagattaaaaacacatttgaaaaccaaatgtttggtttggttgtgttgtggaaaatctgcttctgtatatagtttcaaacaaagcctaaatgataaaatctaaatatacagaacagttttttaaaataatgtcaatatgtgtgttttaagcaggagtatgtctccaaaccttttaaacagagcatccccgcttgctttcaacattgcaaattcgagcagcgaagccgactgcccagacccatttgcaaatggtgctgatgtccaagtcagcaacatagactacagattatcccggaaggagctgcagcagctcctgcaggaagcatttgccaggcatggcaaggtaactttttccctcttgtgcttgctttgttatactctctgatggagtctctagtcaagaggacctaatttgatatacataaccacagccgggatagaagtgtgactgaacaagtttgaactccttccttttccctttggtctgctcagggtggtgctataaatccagtttttacaatgttagccccagagagcaagacgcctagcagtgaaaagctcttgtcttaggcagaaattgaaatggcaatttgtggccaggcatggcggctcatgcctgtaattccagcactttgggaggccaaggcggccagatcacctgaggtcaggagtttgagaccagcctggcgagtgaaaccccgtctctactaaaaaaaaattagccgggcgtggtggtgcacgcctgtagtcccagctccttaggaggctaaggcaggagaattgcttaaacacgggaggcagaggttgcagtaagctgagatgacgccactgctctctggcctgggagacagagtgagactccatctcagaaagaaaaaaaaaaaaaggcaatttgataagtaaaacattgatggatttcagttagctcttcctgctgaaatacaggtaggattctaaaataatgttggctggtcttgtttatgccttattatatttgactcattttttaggtgcaattttgctaaaaatgcacctttttagtagattcttaaaaatggccatgtcctgggttttgtagagtctagaaaagaccccaaacactcttcccatgtgttggcctctgagcctgccttggaaacctgtgtgtgccagagcacacaggcaggccgggccagtgtcacatctctaaaggtcaccctatcctcactttcttacgtcctggtcagcagaagagcagagttcagacatactccttcatggaagcgctgcagtcgacaaatgtgttccttcatggttcaccttcagttttaagacgacagggttctgggcggacatagcgtttagttttcgcttttcctgttgtaggtgaagagtgttgagctcagcccccatacagattatcaactcaaggctgttgtgcaaatggaaaacttacaagatgcgatcggtgcagtgaatagcctccacagatacaaaattggcagcaaaaagatcctggtctcacttgccaccggggctgccagcaaatcactctctttactgaggtaagaaacaagcaagctgtttatttcaggaaataacatttgacccagaaacaattttagaaataataaaaatagattcaatcacattcccacccccttgtgatgattgcatgtggaataatgcttattctagattgatacagttagaaacaagccatttgactcttgtctaagtcattaatcaaagctggaatacagcttaaacttgacaggcacttgggagtaaaataatacgcaacatgttcaaataggttctaaaaatagtagacccctacaataaaagtttataagcctgaaaagtctaaaatattaccttgagatcttaggtagaaggtagatttgtgtgtaaagactagatctacaaatcttcaagctctccatttgcagatatatccttagtgtcaaatagatactcagccccataagtctaccttaagactatctcagtctcaagcgtctggtgatggttttattcatagtaaaatgtgatacttctttgggtctccctgtttcggggagactggcaaaacaggacccactcctgagtgtttccttggatgatcagagatcttttttctaacttgtacttcactattacttaaattacgagttacgggttttttttttgttgttgttctcagaataaaaatgatgcttattgaagaaaatttggaaagtttagaaacataaaagaagcaggggaaaaaaaaccatccacaggcctatggcccaaagccaattgcacttaacagtttggcatcttcttttagttttgtttggattttttccctttgagcgttttttggtgcctctggttttttaaaactgtagttgagattatgttgtattcagttgtgtatccttatctatgggaacgccaatcacatatatctaacaaactgcagtgtggcaggagatatttaagctcttctcccttttgctctgaattcatcatgcttttctgctccactggtgtggaaaaccctatgattgatactaattctactgtgtaacgtaatcttctttcattgccttgtccctaaaatcctttctttaaatttttctggaaaatacattctgacataccagaaatccgtaaatttattttgcatatgcactgggttaattttatgaactctgtttatataacttgtaatatggaggaaatggtctgttccctaatcaaacttctgttttacagtgcagaaacaatgtctgttcttcaggatgcccctgcctgttgcctgcctctgtttaaatttacagatatctatgaaaaaaagtaagttaggtatattttttctttatccagtcagtactgattggtggcttacatgcacaaaaccatggtaatgactcttgaggaacttcagcctggtagaggagaggagacagagacactggcattcagatttacatgtcaatgaatgtttagcagacagttttaaaacgtcttttatttttaacaaagttagacctttggtcctcagtgttgtgcttatttttcccctaattgactagctttagtttgttttttttgtttgtttgtttgttttttaatttttttggagacagagtctcgctctgttgccgaggctagagtgcagtggcacaatctcaactcactgcaacctctgcctcacaagttcaggtgattctcatgcctcagcctcccgagtagctgggactacaggcatgtgccaccaagccttgctaagttttcgtatttttagtagagacagggtttcgccatattagccaggctggtcttaaactcctgacctcaagtgatctgcccactttagcctcccaaagtgctaggattacaggtgtgagccactgcgcctggccaagttttagtatttattggatgaacatttttaagcactagactataagctccaggacagcagggactagctctgccataatactgtatcctaagcacccagcccatagtagatgcttagcagggactagtgagtacaagaccaaggcactgcagagaaggcagaactgggcaagacttaggtcttgtccttgaggagcttatgtctagcgggaagagaaaatgctcgtgaatccttatggacagtgaagaaaactgattggaaaggaggagaaaaagctttgagaacacagaggaagggaagaacaaggaacttggccattatcccacaggtaatagggagccactgaagtgctggaggaaggaggggaggggaaaggtgtggtgatgggaatcatgctgcaggaagactcttctcgtagcagtggtgtctgagagggcaggaacaggggagagaaggaggcagagagggaaagtagctacatcagtccaaattcagagcagatactgttgggacagaactcgatgttacagaaatgtcaaaatgtcaaatgtcattgaaactagagtgggtaactaattttttttattaaaaacaatttttattgagccagggtctcactctgtcacccagggtgtagtgcaggggcacgaccctaggtcattgcagcctcagactcctggactcagatgatcctcccatctcagccttttgagtagctgggaccacaggcatccgccatcctgcccagttaatattttttaatttttgtaatgagggggttttgctatgttgcccagggtggtcttgaactcctggcttcaagtgattctccctcctaggcctcccaaagtgctggaattacaggcacgggccaccacgtccagccagagtaactagttttatgtagcaagcaaggtaaaagggagaggtcattttgattctgagtgttttgccttgcatgactgggatgatggttgcacagttaaactggaaatagggaaataaagcatggcaaggaggtacagcaagtttttggtcttggttttggacattcaggttttaggggccattggagtagctgggtggagaggtcacatagtcttctgcacattgagggacttctttgggagagaagtaggctctggagatagggcagtcatttgcctttaagacgattgggacagactagagagcagataaggttgggagggggaaggagaaatagagggcaggaatggatggaatgccaccagggccagggatgtgggcgagcacccaggatgtgtgccaagagagcacatcaggaatggggggatccaaggccatgaggaaatgcatgaggtgtggggatgaggcagaggccgctgataacttttgagtcatcactacagagtcctgtggctaaaatccagtagggaaggggctgagagactcgggggtaacacagcagaagcagctcctgagcagctggatgtttccattacagggacagggtagagtacgagactgagaatgagagtacaagggagagtgtgtctctccgggaggtggaagaggaccaggggctggtttggtagatgggaatctgagcatatgtaggacactgggaagaaaacactggtcagacagtgagaagaccagggaacacttactgagcacttactatgagccaagttctgtccaggcctaaccacacttaatcctcacattgaccctgtgagataggcgctatcatcaccccattttacagatggaaaaagtgaggccccgattggtcgtggaacttgactaaggtcacacaggttgaagtggagtcaggatgtgaactcaaatctgccagcctccagggccagtgcctttaagttccaagtaagaaagatacaggtcaggaggagaactggggagtccagtgtcagagggtgtgtggatcatgcagttgaggcataggagagttgagagggtcacggaaagcacatatacttctgagaggggagaatggggatggtgagaagtaacacagagaattggaagtgaggggagctgcatcgagagaggtttccaactcaagagaatttggtgaggtcacttaaagaaactgggcaggggctgggggtggctttcaaatgaagtgagcattgtcatggtcggagccagagacgactcaggagtaccaagcatcactggtttgctagtgaatgaatttgtagtagaattattccagttttacctttgaagagatggaggaaccattcttggttattgttctttatttaaacaggatgcgtgtttctgtataatcaaagaaaaaccttctaagtcagcgtctctcttctcttgcttttaggtttggacacaagttgaatgtgtcagatctatataaattaacagacacggtcgcaatccgtgaacaaggaaacggacggctggtgtgtctcctacccagcagtcaggcccgccagagccccttggggtcttcccagtcacacgacggctcctccacgaattgcagcccaattatatttgaagagttagaatatcacgagcctgtctgcagacagcattgttccaataaggatttcaggtgtgccgttcgttttcctttagaagtaattcttttctataagattgtggaacatgttaggatgaccttgtgaacatcttagaccctgcggaatgtcagcttccaattgtgttctcttttcttcagcgaacatgaatttgatccagactcttacaagattccttttgtgattctttctttgaagacatttgcgccccaggttcacagtcttctccagacccacgagggcaccgtgcctttattgaggtgaaccatctcaaagcctttgtcgatataatgccctagttctgctttttataggaagcctgccctttctgcccacatctctttacaaataagtactctacaatgcttcatcctcatgtgtttagccttcagtcaaagtacagtcatgcaccacataacaaaattttggccaaccatggactgtatataggacagtggtcccataagattataatcacatattttcactagacctttcgatgattagatacacaaataccattgtgttatagttgctcacagtgtgtagtacagtaacaggctgtccagatgtgtagctcgggaaccatgggctgcaccagcctaggtgtgcagtgggccgcagcatctaggtttgcataagtgcacctgatgatgttctcaggtgacagaatcacccagcaacacattattgagtacatatccccatcatgaagcagcacgtgactgtttatctgaaatgggatccattcactcagtacttcaacaagaaaatgtgtgtttgcgctacattttagaaacgtaaacgtgaggagggcagattcttccacagaggggagatgtatcataagtgctgcagtcgaaatctccacaagtgttgagagtacacagcttcaaatatgcatacatttcaagacttgtgagagaaaagtattcttcagaagttcatttaatcactccatgagccacaacagtagacttaacacaaaggccaacacaggactcagtggcctgcacgtccctgctgatgtggaagcagacgcgtaactgacttggagcccagttgccctatttttaatccccctcctggaaaactacccagaaaatgccatcagaatgcatcagagaggccagtgcctcagtgcttgcctccctgggtccttaattttaaccttcaaacctggtggtgggcattcagacaaatgattaacacatacattaaaccaaagccttctgtttagcaagcgcctccttttctgttattttgatttaacctttcctttttttgttgttttttcctatttcagctttccagattgttacattgcagagtttggcgatctagaagtagtgcaagaaaaccaaggaggtgttcccttagaacacttcattacctgtgttccaggtgtaaacattgccactgctcagaatggcatcaaagtggttaaatggattcacaacaagcccccgcctcccaacactggtaggtgtcaggtattttgtcctggagctaccacctgtccactatgagaccagaggaggctattggcttttattttaaacagcagcacaatttgccaagtgtgaaaacaccatggatgtgtcctttgatcttttgaaaattcctaaaatgcttgaggggttggcgttactggactttgttttattttttatttatttattttttttgagacggagtcttgctctgtcgcctagctggagtgcagtggtgcgatctcggctcactgcaacctctgcctcccgggttcaagtgattctcctgcctcagcctcccgagtagctgggactacaggcaccagccaccacgcccagctaattttttgtatttttagtagagacagggtttcaccatattggccaggatggtcttgatctcttgacctcattatccacttgcctccgcctcccaaagtgctgggattacaggcctgagccacagcaaccggcctagactttgttttttagatagggccttgctgtgttgtccaggctgctcttgaactcctgagctgaagatgtcgtcccactatggcctcccaaaatgctgggattacaggcatgagccaccacacctggccagtttgaaagtaccaacataagctatgtaaaaaatttgaaactcaaatttcacatttacagatccttttagcaacctaattttgtgaagcttttggcttgccagttgactgaccttttaaaaatagtttcaggggctgggcctgttggctcacacctgtaatcccagcactctgggaagctgaggtgggtaaatcacctgaggtcaggagttcaagaccagcctggccaacatggtgaaaccccatctctactaaaaatagaaaaatcaggcatgatggtgggcacctgtaatcccagctactcgggaggctgaggcaagagaatcacttgaacccaggaggtagaggttgtggtgagctaagatcaagccattgcactccagcctgggtgacaagagtgaagctctgtctttttttttttgagacggagtcttgctctgttgcccaggctggagtgtagtggcacaatcttggctcactgcaagctccgcctcctgagttcacgccattcccctgcctcagtctcctgaggagctgggactacaggcgcccgccaccacgcccggctaatttttttttttttctgtatttttagtagagacgggtttcaccttgttagccaggatggtcttgatctcctgacctcatgatccgcccgcctcagcctcccaaagtgctgggattacaggtgtgagccaccgcgcccaggattttttttttttttttttttttgagacggagtcaccctctgtcaccaggctggagtgcagtggccggatctcagctcactgcaagtccgcctcctcggttcataccattctcctgcctcagcctcccgagtagctgggactacagacgcctgccaccacgcccggctattttttttgtatttttagtagagacagggtttcaccgtgttagcaaggatggtctcgatctcctgacctcgtgatccgcccgcctcagcctcccaaaatgctgggattacagacgtgagccaccgcacctggccgaaactctgtctttaaaaaaaaaagtactttcaggtatttgaaggaaataccacttaatgcagatttaccttcgaaagtcattttggtccacgttttggactttgataaatgtgaaaataaatttaaaagaccaaggtatttggacctagacttgggtgagtgtctgagttacgggcatgtcctgagttgcagatatccaaggctgctgcccgtgaacgacactttacttgttgccttcctgtgtatacacacatacttcctcctctttgtccccaacacttttgcttctcccacctcccttaccctacaggaaaaaaggtgaggataaccaaggaattctttctgagtcagcctgctcttaggaatgtgtgtactcaggtttcttacgggacacctcctttcttttccctctgtcttagacttctcaggggccatagattatgccactcctcctttctcctaagccatgagcccacaagcctccactttttattttattttattttattttatttatttatttatttatttatttattgagacggaatctcgctctgtgtcccaggctggagtgcagtggtgcaatctaggctcactgcaagctccacctcctgggttcatgccattctccttcctcagcctcctgagtagctgggactacaggtgcctgccaccacgcccggctaatttttttgtatttatttttgtatttttagtagagacggggtttcaccttgttagccaggatggtctcgatctcctgacctcgtgatccgcccgcctcagcctcccaaagtgctgggattacaggcatgagccgccgcgaccagcaagcctctccacctttctataaagatttccgtttgattacttatacctttttaataggtataagcagtcaagatggtgcaaaaacctgttccttacacccttttatgtcatgctaatcttacaacattatcactttctgtggttttctgggtaacgttttcagctccactatggattaattttgctcttctgggccacctacctgatgaccatttataactttgtggaaaggtacgttccacatgaccaagtttcagaaggatcttggaaatataactagtttctaaactgggagcttcttgtgtactttgacttctgctataaataacactatagtagactctgctttaccttggccgcttaactttgaggattagtgggacagcatttgacagcccgtgaataagttagttagctagttattggactatgagacctgaatatagaaactgagacgtaaagcagctactgtatttggttttgtttgcttccccatgatcgaactcaagccagggactgcagggccattttcccttctttcagctggtgaaatctgtgctttctgtcttatacacgttctttttcttctagacccttggcttctgcgttcgaagagtcctgtaggtaacccccagctgatccagttcagtagagaagtgattgacttgctgaaaagccagccatcttgtgtcatacccatcagtcatttcatcccatcctatcaccatcattttgcaaagcagtgccgagtgtcagactacggatactccaagctgattgagttattagaagcagtgcctcatgtattgcaggtaaggcgtgtcacgggattacttgtttacaggcaggaatgttcctccatggctttggctgcctccatcaaagaaacagtttaattcctaagaagtcagttctgggcagaacatccactaaaaactttcttcagagggcaggaataacacacacaggcggcttctcaatttttcagaacgctgctagtttccagttttagaggaactccttggaggactgaggagtattttccctctaagctctatagaccttcttcatcccagcacagctttctccagaactgttcatgattacaaggaagctcccatgaatagccacatacttgtatgttggtgcctatgtgagagtcaagggcttaacctttcttctaaatttaactagttggagacaagttactgggctagagtgtagcactggatcctatgaagacttttaccagttaactcacagtgttataacagcttcccactcactaaaaacggcttgaaaaacttgtagaccaatttgtctggacaaccaatacagttttcatttctgtactcacgacttttcttttcaaaagattacacttttcatttttatactcaacgactgtttgggagaaggtgtgccaggccaaaaacgataagagtttcagaaggccttggacatttgttccttttgaccaactacattttgttgatcgacatgtgtttcaaattgcacacattctacataaagggagtcatgctctgaggctagtaacgagagggtgagccagcagcaaggaagtcgctgtctgctgaggtcttatgtgtataaataaactatttgctttgcagattcttggaatgggctccaaacgtctgctgacccttacccacagggcccaggtgaagcgctttactcaggatttactaaaacttctcaaatcccaggccagcaaacaggtcattgtgagagaattctcacaggcttatcactggtgagttgatgaaaagaacagaaatgaaagtaaatattttaggacattttatcttctgccaaactctaaatagttatctagtatttctattaagcattcttttggaaaacttgtagtagttttttgtttttttttttttttttttgagacggagtctcgctctgtcgcccagtggcacgatcttggctcactgcaagctccgcctcccgggtttatgccgttgtcctgcctcagcctccagagtagctgggactacaggcgcccgccaccacacccggcttattttttctattttttagtagagacggggtttcaccatgttagccaggatggtcgcgatctcttgacctcgtgatccgtccacctcggcctcccaaagtgctgggattacaggcgtgagccccagcgcccggccggaaaacttgtagttcttctaccgatgatactactcattccgtatccacttccgttgttaaaacctaggtgtttctcaaaggactgggatgtcactgaatatggtgtttgtgagttgattgacatcgtatcagagattccagacacaaccatctgcttgtcccaacaagataatgaaatggtgatttgtatccccaaaagaggtatgtgacttaacatttgctggaaggatattgtctatctcctgttattttaacatagtgtggcatggaagatgtggttttccctccctgtccgtgcttcctgaagattccacagaaagcacagtgtgaaaactgctgctctttggattctgtgttcttcaaagtaggtgaagctgttctcaagaacaaaagcaggctggctttttagaattgactctaaggggaaaaaggggcatcatcagcactttgctcaaatgccttctgcagcctggctgtggctacatgagccttagtcatccagttgagaatctgtcaccgtgcctgttggctttgctcttctgttgaactctgagctactttatttactgtgcacacttgagaagggaagacaactcgaatgtttttttttcttttgcctttcaaattttaatagttgaagtcagaactgcacaggtccagttacgggtagaaagtacagtatttgagggatgcgaaactcatggatactgggggccaatttttcgtgtctgcagtttccgcggggcagaccgcaagacttgagtaggtgcggattttggtatccaggcagggtcctggacccgatcccttgagaacaccaaggggtgactgtatggtcgtatcctccttctattatctggttcttaaacggtgctcctgcagaacattgatgtccatgaaatcatagaattccagggcccattctcacttaaaaattaatagaaacaatctcagcttaagctttccctcctgtttatttttgttcaacttttgaagcctgattctctcttctgctagcaagttttaactgaagatcagatgaataaacaaaaaaagtggggatattcagaagcgtgatttcatgggaataatttctagagtacttgcttaagtacagggacctgggtgtgtgtcatgttaatagatatggggcaggggctagaaaattgtttctagcttataagatgacattgtttctagcttataagatgaatatatatgaatttcataatataataatatcataacttcctggtgttctgccctggaacatgtttgagaaccacttgcaaagagggaagagtatatgtgtttgttttaggttgtgtgtgtttggaaggcaaggatgatatcgtttataaattcccaaaaggatttactctagtgtggatgttgaacacaaatgggtagaaaaaaactgtgattttatgttttttggtttttttaaaagaacgcactcaggatgaaatagaaaggacaaaacagttctccaaggatgtcgttgatttgctgcgtcaccaaccccatttccggatgccctttaataaatttatcccttcttaccatcaccactttggccggcagtgcaaacttgcgtactatgggtttaccaaactacttgaactttttgaagccatacctgatactttacaagtgagtgaagaaattctaattttataaagtatttttctgaacaacgtataggaaatactttttcacgttccagacctgtttttctgggaagtagggagttacgaaagaggatgaaaatctaagctattccagtcagagaagccatattcctgactcattagtatttttagataaatatggctttttccttcaataaaggattattcaaacttgttttgggggtaattattgaaaaaaagattcagtaggttttcttttttttgtttgtttgtttttgttttttgagacggagtttctttcttgtcgcccaggctggagtgcaatggcgcaatcttggctcactgcaacctccgcctgcgggttcaagcagttcacttgcctcaacctcccgagtagctggggattacaggtgcccgccaccatgcccagctaatttttctatttttagtagagatggtgtttcaccacgttggccaggctggtcttgagctcctgacctcagttgatccgcctgtctcagcctcccagagtgctgggattacaggcgtgagccaccacacctgctgatttcttacactgaatatttgttcattacttttatacttttaaaatccttcgtgttgaaggtaggtctgagtacatgaggtaacatcagtgctaagctgttcgctgttgctaagttaaaccaaatttctgttgttgattttattttctttttttactactgaagtgctttttaaaaattgttttattgtggcacaatacacataacatagaacttaccttcgtaactatctttatatctcctgtccagtagtggtcagcacattcacattgttatgcaaccgatcttctgaactttttcatcttacacaactgaaactttatacccattcagtaacgctgacttgttttttcattactagctgcatactttttttgctattctgtaaacacccgtgatttgtttattttccctttcctccccccgtgtgttttcaaaggtattggaatgtggagaagaaaagatccttactctgacagaggtggagcggttcaaagctctagctgcccagtttgttaaactccttcggtcccaaaaagataactgccttatgatgacagatctccttacagaatatgctaaaacttttggttatacatttcgtctccaagactatgatgtcagttccatttcggctttaactcagaaactctgccatgtcgtgaaggtaaatgtttttttttttttttttttttttccctcatgggataaaactcacagtgacctaattctcattaggacgtttgcgtgtgctgtagcgtttctttatttacaccttgaactacttaactgtcacagcattatgactcgttttgtgtcattagtgcttattaggtaatagaagccttggtttggaagttgagagttttggtcttcctcttgtgtgtttctgaatggccttgccaaagcaatgcctttgtgaactgatgaggtcactcttcaccccagggttcggtcatgaggtgcagctgcctcagcactgctggcctgagcttgactccttccagtgtgagttttgcctgtgacgttcttgggagcccgtaatcacacagtgtcctctccctccacattctcacccacttaggagtaggcttaggagcaagcgagggtgcagagtggcctttgtcactggcagagctgtagtagagagggcagctcgtgctgtttgctgtcctggactgcacttgacccttcctgtcctaggcagagcagctgccagttttcggcctcctcccccacaggaccagaagaagtcactgccaggaggaaggaatggaaagggaagcatgaaggacggcaccctcagttacaggcccattactagctgcacacatttctgtgtcatttaattccgtaaacagccagaacgggttcactctccctttccttcccactgtggggtttttttggagttggagtcttgctctgtggcccaggctagagtgcagtggtgcgatcttggctcactgcaacctccgcctcccaggttcaagagattcttcttcctcagcctcctgggtagctgggattacaggcgcccgccactacgcccagctagtttttgtatttttagtagagacagggcttcaccgtgttggccaggctgatctcgaactcctggcctcaggtaatccgcccacctcagcctcccagagtgctgggattacaggcatgagccactgcacccagcccccactgttttttaatgtattggactgcagctaagaagacgttcttaccttggcagaggtaggaacgctcagagctctccttaggtactgattggttggaggaggaggtgagagagcaggaagcacaaccaggagagccgaacatccctgagccaaggcagaggaatggccagcagcatcgcaggagggctggtcagagagggactgcctgacttccaggtttagctcagtgggaagagtcggtgctgctggccaggtcagtggcagtgttggttgtgtagacagaagccaccttggagtgtggtgaggagtgaggagaggtgagaaaatggcccaggtcatctggacagcatcctggtttgtctgcttgtgaagatggagggctgtggcagcagctagaggctgtggggctgagggagcaagggaggatttgggctgttggttttcctacctggaaaaacttgagcatgtctgaaagccattgatgtggatctgtctagagagagaagatgaacatacaagggcgagaaggggtaagacaggagggccttgaggtgtgggagactaggaaacagcacacagaggaaggaggaagtatacagggcaataggctgggggcaggcatgggcaggtctgatgtttatcatcaggaatagaagggagtcctcttccaagagtggttttccactagagagagggactgatctctgcttagagagagagaggagaggcagggctcaggacttaggagtggggagaaggtccacagttgtcatggtgagtggagagtggcttgatcaggatgtcacgtggagtgcaggggtatcgagagctcactgcaagttggcaccgtagactctgggagagcagcagttggggtgtggctatgcaggtgtcggttcagggaaagcaggtggttggattcaaggtgggagtttaccgatgggcgtcaggaaaaggcatgggatgagcgaatttaaatattgacaagaatgtcagtgccagcatgacaaaagaggagagtgaagcaagggagtgggctggcaaattgggagcagataggaggcagtgatgctgctgaggtttgagaaggggcggagttgagcgggtagagtctctttctgcactcccaccccaacagcagctccagacttgcttttgcaagtgggatgctcaggaggtttgaatgatttatgttggatggggtaatgacaggtttgcactgtgaccctggagatgggtgtctgcagtgaaattgaacacaggaggatgtcgtcggagatgacagaggcaaggcattgaaaggctatacggctgtggtgtgggacaggtccctgggtgttcagttgcccaggatgatgaaaggggtggactcaggtggataggaagaccccacgccatgacctagggctttgctgggtgagtgtgatgggtgggcagctggggtgtgagcagcaagaatggggagagctgagagaggctccgtggtgcctccctggctgcccactgggtctcctgggagcttctccaaccttacctttcagattcttatagaattagtcccagcacactctgagcattggtgtttttaaaagctccccaggcaattctaatgcatagccgggattgagaatcaagggatggatccaagtcgcaccagaggagcaggctctggtttggtttctttcctaagcagctgtagtgatggtgggggtctgggtggctaagatgactgggatcccctggacttgtatcggttggttgattaaacccgcttctgaggaggaaatctatacagtcccataatcatgataagtagggtgggaccctgccagcctccctcctgccttggctctgggcacatgtcagaaccagataaagatgccctggtcttgggatggctcctcaagtgccacccacctctctctgcctctcagaatccacggtccaaagagtgccaacttgtggtgacttagccctgccaagacctttggccctggcaggaaaaccagataaagggggcaaacaagctgtcaggatgagcattggtttgtgagagcagtgccggagccgtgtgtgtgccaaagctctgcctgtttttgtgccaggaaagctcacgccacagcctcaccctcgccacccacagcctgctggctcagtcaccagatgcgtgtttcttcacatggtgtttggtccccaagtgacaatctctgtcttttttgtaaggtttccctctcagcgcatttaaccgcttaaaccctttatctccttgagaatctgaaataattgaggagtggacagttactagtcagatgaaaataccagctttgtggtgagtaatagcagactagaaaaatgcagcttgccttgtaatcagagtaggccctctctcacctccccagcccgccctggggacgcatatgggcaagtcgggtctgcacagaagccatgtgagtgttgcttagagtctagcctccccatccctaccccccttcgagcacagcaacccacacttcacaagcttggaccactggccatcagctggccagtctgtgtccttcttatagtggggtttggaaagaatgaatgaaaaataaagagaatgatgcaatttcctcccccattattatcttgttgagagttttcagttatggaccggcagggggaggacagtttctgcttccatgttggtctggtgtcccaaagacgctaaaaacaaacccacttgctttatttcagtgtaagagaaaaaaattagagatttttcatctgttggtctcattaaccaaaatgaagtgagctgagttgggtataacctagggtgtctctcttgagctctgaaaagtgtgaattctcgttttccccaggttgccgatatagaatctggcagacagattcagctgatcaaccgaaagtctctgcgatctctcactgcccagttgctggtattgttgatgtcttgggaaggaaccacccatctttctgttgaggagctcaagagacattacgaaagtacccacaacactccccttaacccctgtgaatatggattcatgaccttgaccgaactgctgaagagcctgccatacttggttgaggtaggcacgttaatggctctttagaactatcattgaaaactatcgattgggcatttccggattacctgatggtctagattagagtgtgtagagctggaagggacccgagagaccatttcatggatgaacacgccgagacctcaggcagtgaagcagccctgcctaaatgggtggcagaagccagtgaaagcctggtctcctcatcctggcactggggtgtgtttgtcccgttctaggatgaaagcctggtctcctgatcctggctctggggtgtgtttgtcccattccaggatggatttcgctactgttttatctttctgaatgagatggtttatgtggtggcttgaagagagagatgagtaaggtgagggcagaaaggaaggttggccagccagtcccccaggcagcctttcaagaatggcgctccaagattgagagaatcttaagagaatactgcatgcaattctcgggcgacagatataaaaacctagagtaaataaatgaaatcctggaaaaaataagttaccaaaattcactcaagaagttaaaaattagaccaattaccataaaagagactataaaagatcactgaaatataccagtgaaaaaggcatcaggaccaagtgagataacaattgaatttcaaccaaccctaaaagaacagataaatctaccttttaaaaaaccattctggggcccggcaaggtggtacacgtctataatcccagctactaagaaggctgaggctagagaatcacttgagcccaggagtttgaggccagcctgggcaacatagcaagaacccatccccaagaaaaaaaatactgttctaggctgctgaaaaagaaaaaaggaaagcttaccatttatttttacgaagccaaaataaatttaataccaaaaacataagatagtcccttaaaatgatcctaaataagatattaacaaatgagctccagcaatttaaaagaatgatatgccattatcatctaactgtgggacacatcattaaataatgaaaggatatacatccagcattttctaaactctgttaatatctatcctaagaacaccagttctggacaggtgttaatgcatatttcaggacaaaggactttccctgtccagctaagattgggaatatcctttctcttggcgattccatagcatgttaaacactttgaaaaggtttgtggtaaagaaatctgcttccttaccctgcatacacaagggttttgtgtttgtttcttgttgcttttgatgtgtttttaaagaatgctagtgtcatcctcttatcacagtgtttcttggaaaactggtttggaggtgcagtttaatggccccagtgttcactgtgtgtaccgtgatttgccaacacagtttgcctcccccgatttcttccctactcacacactgtctcttcagaccgctgcagccttcgacttgcaaatagaactgaagtttgctggaggctatagccttctcttggaggaaatccttgaatatatccctcctccttttctttctcctcttccttctttccttcctcctcctcctttcttcttctttgtcttttttgtcatcttcatcttcttcatctttgtctttgtccaattcgtcgtcttcgtcttctttatcgtcgtcttcgtcttcttcatcgtcgtcttcgtcttgtcttcgtcttcttgttctttgtcttcatctttgtcgtctttatcttcgtttttgtctcgtcgtctttgtcttcatcttctttgttgttgtcttctttatctttgtcgtctccttcttcttcgtcatctttgtctccttcttcatcttcatcttctcatcttcgttgccttctttttcttctttgtcttcgtcttcaactctgggccttttccctcagtgggaggccttcactttccacggggcagggccagtcactaatatttctaatgctgcgttttctttttaaccaggttttcactaatgataagatggaagaatgtgtgaagctcacaagtctgtatttgtttgcaaagaatgtgcggtctttacttcatacttaccactaccagcagattttccttcatgagttttccatggcctataccaagtatgtcggagaaactctgcagcccaagacctacggccacagcagcgtggaggagctcttgggagcaattccacaggtgggcatttttctcagcttccgggagagcatcttctgaacagccacaggctaactgtcctgaacagaaaaataaaatgctgccagaataatggaacggcaggcattttgaattgatcctttcaaaacatactgttggtctaaagtaaatgattttagcatttctccttgattctttctgtaaacctttattaaatccctatatgccaggtgagtaagtttcaggctgtaactctagaaaggtgttggttaatgggagagtcaagacccccaagcaggcaactagtcagggcggtcagggcagtgggcgcgctgaggagggccgtgtcagggcccacttcccaagcctggggagcctgttgcaaaaccttcaaggatgtgcctgagggaagcacgtgacaaggaggggagagagcattctgggcaaaggggatgatgacatgagcagatgcagggttgtgacaagtggcatggagtgtcgagaggctaagagggagctgagagctcggttagggagggcgtggctcctccaggtaaggagggaggactgtgttggagagagctggagcccaggtttgcatttgaaaagcaccccagtggtgctgtccatggtagagccgagagaagcaggcatggagaagggaactgggctaggatcctggccactgcagaggtctgggtcagtgttagatggagggattgagccagagtaaaaatagtagaatagaggaagtaggaaggacccaggcaaagcttgcctgggagctgagatcagtgacctggcgacggtgtgcacatgtagggggcctgggagcctagctccactactaccactctgcttggctgagatggagagcggcaccatcagggagaggactttaagatgctgataatgaacttagtttaaagggtctgagagattgctcttaattcttttaggtggttgttcagtttctgcaaaaaaatggcaaagagctctcatgtgagaactaccttaatttatatgccaaagctggtgtttggaagacagtctttttaagaattataaaggatatttctgaaactgtgtctcatgatttttgaactactctgctttttataggggtatgtttctgtcagcttctgttgctttaaaagctaaggagagagtagagaaacatgcttcttggcagtaactcagctcctaaattctagcctaaggcaggctccgtaggtcacactcttcctgaatgttagggcttctgtcccctccttttccgctgcttaaccagtagtatgtcttgtgtgcaggtggtctggataaaaggacatggtcataagagaattgtagtgttaaaaaatgacatgaaaagtaagtaagcacccatcccctccccccttaaaaaatcacggttctctcactgacatttctctctgacgggtgctctttgtcctgtaggtcgtttgagttcactcagtctctcccctgccaatcatgaaaaccagccctcggagggcgagcgcatcctggaggtgcccgaatcgcacacagcctcggaactcaagcttggagctgacggcagtggtaagagaggaaaagcagagacataggagcttgtgaaattctaggagaaacggctttggggtcggggagagcgagggaaaggactccagcaagtcatccaatctgctgaagttacatagccacacatttttcaaagcagttttggtatttagttagtaacaggataaaattgacctttatctgttagcattgcatggttgactggttaaagtccctgaaggatgttggcacccccataatgatcatcttaccccagttcagatgttgaagaaaaaaattattccgacacttattataatggatattcatgacacttgcaacaggggagagagagccaactcccaatacatagcctaggagcagagtgagggctcagtgggtggaaaattactaagaggattcttgctataggcatgcaggccagccaaggatctagacatcagtggttgggaataaggaattcgatcagctgtgaagggtgaggggattctcactaaactgactcaagctaagactctagagcgagccggcaagttcagcaacagacatggaaggccaaggtcaggcctgatccggaagagggctcagggtgcctgactcatggctggtcaaggcgtctttgtcacaggacagccctaggcaggatttgatatactaatgcattaatattacccaaaattacactgagtcacatagatttcagatagatccacctctgtagtagatagaggccaattcttggaatgttatagcagttctaacttttctgaaggacttttgaattcatcgttataggtgagaattttgtcttcataacatgcggcgagatagcacgttaccgtcccctgtgcccttaggataactgagttacacagcatttgacgttttatgaagcgccctcctgggaatcatctgccgaagctgccccacagccttcagcagtgctgacctccgttgtgcagcggaggctcggaaatctcaggcagtcacgtattacagctcacccagagtcagcagctaggaagccacggaaccaggcccagggcttcggattctgagcttccacttgctgttaactacgtacaccccgtctcaggctgtcccttctctttggaagctgactgcaggacccttttctctggttgggtcttttgaggggccagtgttcctaagaacacggatcttcagaagaactagcttattaaggcgttccattaccaggatcttcctgttagtgggttttgggtttttgtttttttttttttttttttttaataccttaaatacttcttgactctcttatctttaaggcttagaaggaaaacttcaggtgtgagcccagggtgtgtgctgggggtgggcgtggaggtcctgtggtgtcacggccctccttgtttgcccagggcccagtcacacagagcaggagcttctccgcctgaccgacgactcccccgtcgacctcctgtgtgcgcctgtcccctcgtgcctgccgtcccctcagctgagaccagaccccgttatcctccaatctgctgatctcattcagtttgaggagcgccctcaagagccttctggtgggtgactccatgttgtcatggggattttcttcggggtttaaaacaaaaccacgatgagatactgatatagtaaatgacggaggtgggaagggactaccccttttcaggtggaaaacactgtgctgattattcgaccttctttccccacctgggttcctgcagaatgggatgcacagcctgaggttgcctggcgagcatcaggcaagggcgatttggcagctctggagggctggtggctcggggctgtgggcgagtccacaggggtgggtggggcctcctgggcttctgctctcccagactttgtgaaggttcagctgctctcaggcacacctgtcaccagatgtacacgtcacccatggtgggggtccagagggcccaagggctttataaaggggtgaatggagggaggtgtctgtggctggagccccggactctgcccagtgatataacagacaggaagctgagcacactgagtcccagcctagtgcaggcattggcactgaccctgtgctcagggctgacagacaccatcacatttaactcttaccacggctccaggtgagagccgtggaataaaggcagctgctttattccacaggctgcgtgactaaggcacagctggtgccgtcactagagaggcagtggccccgggctgctgggctagcaagggcagagccggcattggaacccaagccctcttgtcctgcggtgtctcctggcctctggagaggatggcccatctgccctgtacagatccctccctgctcttcatctgttggaacccaactcctccccactgctggtgctgctttccaggtcaccaggaacaacccgtggactcctggcttggcttttaccatcttggttgttcttggcagcgttcagcactgttgcccaggaaaagaactgaggctgttgacttggaaaataggagatggggaagtaactgcctgcggatagaaccagcctgtgcagtcagacctagaccatgccctgctcctgtgcagtgcccccctagggttggtggcacattgatgttagctcgtttgtggggttgtggcctttgtgccttcagtctgggcaagttcaactgcatgcaccggacaagagaggaaaataattaaaacactgtgggcagttctgtcagccgctcttctcttgagggtcagcctaggcagggagctggctctgctgtcccctctgccactctcaccttccatgggcctttgggagcaggagccctgtgccctatgcagtgggagtctaaggcataatgatgcatctctttcaagcagcgtggccctgtgtgtagagcaggtgaattacatgtggctcagccacagaaatggcagtccagaagcactgtgggaaagctggctgtgctcaacttcctgggttctgagggtaattctcactctgcgtagtccttccttatccccggtaatagacccatggggagcataggtcctctctaaatggagcaggccaggagctccctgacacccagatgctccgaccccaccccctaccacccacggcctcccgcctcaggaagtctctaagtcgtggatagctttatgggtccttaatatctggcaggcagaatgaatgggcagagaatccaaaatggaaaaacaaaaagttttaacctttgctcattcatttatagctcaaaatagagatctttccaactttgtaatccagtgggagaggtgggatgcagtttatagatacttgatttctgtgccaagttcactggccacacaactcatatgtaaactgtggcatagatgtagcatttagaagctttttattactattattatcttttgagaaaatatgagcaaggaagagaaaacccacacttcttacagttcctggatctgaatctgtttgcttttctgtgtttacagaaattatgattttaaaccaagaagaaaaaatggagattccaataccaggaaagagcaaaactctgacctctgactccagctcgtcctgcatctcagcagctgtccccgtgcctccctgcccctcctcggaaacctccgagtcactgctcagcaaggaccccgtggaaagcccggccaaaaagcaacccaaaaatagagtcaaattggcagccaacttttccttagcacctataaccaagctttaactcccatttggaatatagaattaggatgggaaaacactgtctgattctgcacacaaaagtgggtttcaaaaatacatccttttctgtgtcatgaaaaccccccgaagccattgacttcatcttacctgtgttctatcatgtttttcttttccattgaacacagctttgagctgaagtctttcttttcttcttcctttttctttcttttttcaattatttgaagaacttgtggcatttgttaaagaatccttaatatattttaccaaatttttagtaactattatgaaatacaatggtgttccaaaagaagaaagcactaaaaactcaactagcaggaagcggttttgcttccattgagccacgtcggtggtgtcatcctacatgtagcataatagagtctctcagcctttgcttactggtgtttccgacagtattaacccagtgcgtggcatgtctttgaagcaaagcctgtcccgctagcctgtgtgttcacacaccaaaggagaagggtaggcgaggggttcggagtgtattttcaggttggaatgtgaaggttcctggcttccatgtgacttgtaagtgtgccttgttttttatttaaactatgtctgtagttgacaaaagtggcttcatcacaaatttttttaaacgtttctactttggggttccatttaggagctttctagaaagttgaggatgtttgaagcttcccttctgtgttccagtttgatatgggttaggttaaggaaaaggagatggtctcgatgtcatggatttaaagtcagcatttggattacaacacacattattgtgtgtcgagaggcagcattggaaagagcctgattttctaaaatatgcatcaagtgcataaattacaaatcagagctgagtggggaggtgcttcagcagcagcgggatcaatacgatttccactgggaagagacaggaattctacctacacataggaaggccaaggttgatccacttaaccttgttattgtaattttaaagctggtatcggtagctgggaagctttatgtgtgtgtatgtcagctcagcatcttttaatcgtgtctgattttactctcgttacttctcgctgttggaagcatctctgggtttcttgtggcgtctggtgtggaatggccttcctctctaggtgcctgaggtgtccgctgacgggtggcctctcacccccctctagagaaacctgacatttacaatggattgtatttgtccggcaaaaaaggcggattcattcatagagcagaaagaacctgttggcgtaaggtcttccactagttagatggtttcttttggggaaatgtttatatttggtaacttctagaaagccagaaaatggactctgatttcatagcattttgataaaatgccacaaaataagggctatagagagatttttacaagtcagattttttgttccccaaatcttttaaatgaagccagtgactcccagttctcaacacatggccccagtcaagacagaacaccatggaaaaaaccctgtaagtattatggcactctccgaatcctcctgaaggcatttcctctacagacatagtgttacaggaagtgaaatgcaaatgtgcaattttttttaaaggagcttttaaacaaagtaataataattggtgttgagaacatcagttgccttattctaagatttcataaggctgagtttgcacgcttggacttcagttctgctagcatgtaaagagtggtggactttaaaaccgtaagaggtatcattacaagtcacctggaacagactcaaagaacaggttctttgggcaacagacaaagaagaatcaagttctgtgctgtcccgtgagtgtgtctgagtaccattcactggagttgctgcttaggtctgggacgtgtgtgtgactcttaacaattgctgtctgaaaatgagagagaagacttcggaagcacattgtgttcataatgtactccacaatggccagtccaattgctatctatttttttatccagaggcttaattaaatgatgtggtaaaatgatgtttgagcattaagacaatgtaattctttatttctgggtggaaagatataccggattaaatttatctgtttaaaaaaatgacaaaagttatcaccaaaaccccctttcccatcttgcactgtttgttttggattgggtttgggggaaagagatgtttttcttagttgtctactttgtttgaacacttttgttgtggttcaagtgctgttttgtgtgttgggaccaaacagttgtcaataaactttacaagcgagcatctattttgagtttcccaagtgagtggttttgtctgtctgtctgtctgtggggaggaattacaaaccaatacagttctgccatctttcattttgggtctcctcaacttctctccccttctggaaatagaattgtgaggtggagagtaaatccgtctacatcttagaggccttttaaactcagcacacgccgaagcaggtggctggatggtgggcccttcgtcgtcaggatcctccaagttttccagcctttgttccagcttataattacatgtgggaaaatacagtaaccacaaaaaccttccagttagaaaactctattaattcctaggctctctcttcttgtgaaagaaactccagcgtgcccgctgtctcgtttttggtcactgctaagcatgctttttgaataagccaatttggaaaagagttattccacagatacagttgtgaagccctcccatcccctgagaccgccattaccccgtcacccctgccaccagcaccctctggcaagaatttaaaaggacccagaagagacttgagtaaattgcttcttgatgacatttttttcaagttcagcaatgttaaaagctgctaaagacctttccaaacatttcacgatggcaaatttgtgcagaaaaagttgagtagccatcgtgccccttttgagcggcgtcaggaggtcttgttaggtgtggactggggctggaacggtggctttgcatttatctttgtttgtttcccacctaggaaggtgattcagaggtgggggcctagaagacagctgtctgggggagagcagacctgtccgtagcagagggggctgcgctgattgaagaagatctgttccctctctgttccctttgccagaaggagcgttgcgctttgggattcaccttcactttctagctgcttccatgggcagagggtgagtcatggcgcagaagccctcagcggcctccacccacctgctgtccccattgctgggggggggggcggtgggcggcaaaacttcctcaattctcctagtgtccctggctgggccttaaactgacaaagacattaataggaaaaaagcaaacaaattttacttcataccagttttgcgagagtcttcataaggaaatgaagaccccagagaaatggctaagcctgagtggttttttgttttgttttttggttttttgagacagtctcactctgtcacccaggctggagtgcagtggcataatctcagctcactgcaacctccacctcccaggttcaagcgattgtcctgtctcagcctcccgagtagctgggattacatatgtgcaccatcacactggcaaatttttgtatttttagtagagatgaggtttcaccatgttggccaggctagttttgaactcctgagctcaagtgatcctctgggctcagcctcccaaagtgctggaattacaggcatgagccaccacgcctggctgagaacgcttttttttggggggggggggggcggggggaaaagggctagagagcttagaaggtgccaagccagagcaccaagagccagaactttccttagcaagatgaagagaagaatacacacgttccgggaaggaacgccttggaagtgggggagctgaggtgcagaggaagaaggcattgcagggtggaaggggccgttcttagagggaaatcctgctcagtggctgggctgctcagctcctcactccgcacgaggtggtgaaccaaccaggagcatccgcaggggagcagtaccagggccagcagggaacatattgggcctgcttggcaccgtctcttccatccgcctcaggcagctcatgtgatggcctccaaaggcttcccaggtgcagggcctgggcatgagggaacccccgctcctaccacccacctgcccccactgcagtttctggtatcagcaagtgcagacaaatccacactggggctgcagggtcgccgcccttggtatttcagcagccagagtctgatgcatcaagggcaggtgtggcaagaatcaggaaatacattttttttttttttgagacagagtctcactctatcgcccagactggggtgcagtggcacgatctcggctcactgcaacctcctaccgggttcaagcgattctcatgcctcagcctccgaacagctgggattacagatgctgccaccacacctggctaattttttttgagacggggttttgccatgttgctctggctcgtctcaaactcctggcctcaagtggttcacttgcctcggcctcccaaagtgcggggattacaggcgtaatataatatagatattatatatagatatagatatagatgtctctataatatctatatataaatagatatatctattatatataatagagatatatatctatatataatatatagatatctatatattatatatagatatatatctatatattatgtatagatataatatagtcacacagtcaaccatgcccggaacccccaagcccccactttttttttccgagatggagtctcactctgttgcccaggctggagtgcaatggtgcgatctcggctctttgcaacctccgcctcctggtttcaaccgattctcctgccttagccttccgggtagctgggattacaagcatgtgccaccacacttgctaatttttgtatttttagtagacatggggtttcaccctgttttttaaattctctaaaaggaagaggacactttttttgttgttgttgttgttgtgttgtgttgtgtgtgtgtgtgtgtgtgtgtgtgtgtgtgtgttttgagacaaagtcttgctgtgtctccagactggagtgcagtggcgcaatctcggctcactgcaacctctgcctcccaggttcaagcgattctcctgcctcagcctcccaagtagctgggaccacaggcgcccaccaccatgcccaggtaatttttttgtatttttagtacagatgggttttcaccatgttagccaggatggtctcaatctcctgatctcgtgatttgcccgcctcggcctcccaaagtgctgggattacaggcgtgagccaccgtgtccagccctgtttgcttttaaatgggagagacctgtttaaatccctccgatgggaagagaaagaacaattggggctacagtggtggggagggagggagatgaatgatgactctgtcactaacaacccctgggaccgtgggcagtggatttactgccacttcctcatctgtaaagtgagaagtgataacaggatctgactcactgtttcaagtgtttattctgcctccgcttgcaacctcttgcaacctccgcttgaaaagggtaatggatttactgctacttcctcatctgtaaagtgagaagtaataacaggatctgactcatcaggctgatgtgaggagggaaccagccagtgtgagcacattgctcaaggcatagagataagctacaataaatgttattcccattatcaacctcctccatggcttctaaaaggagcaagtctaggtgtgcaggaccccacagtctgcaaggtttcccagcttggaaggtggccctggtaatctggaagcgtctgtgacagcttaaataaattggattttttaatgttttctttttttaaaaaaatcagtaggaattacaggaacatacagtaggtgtacccagagcttagcggaagtaccagaggcaggattttgatgagggtttgatctcctctggttcgttggatctgtgagtgactgctgtataactggcctgaggtcagacctcgctgacccccccactcccctctcccctttttttttgagatggagtctcgctctgtcgcccaggctggagtgcagtggcacaatctctgctcaccgcaagctctgctcactgcaagytccgcctcccgggttcacgccattttcctgcctcagcctcctgagtagctgggactacaggcgtccaccaccacgcccggctaattttttgtatttgtagtagagatggggtttcaccgtgttagccaggatggtctcgatctcctgaactcgtgatccgcccgcctcggcctcccaaagtgctgggattacaggcttgagccaccacgcccggaccccccaagcccccccttttttttttccgagatggagtctcactctgttgcccaggctggagtgcaatggtgcgatctcggctctttgcaacctccgcctcctggtttcaaccgattctcctgccttagcctcccgagtagctgggattacaagcatgtgccaccacacttgctaatttttgtatttttagtagacatggggtttcaccatgttagccaagttggtcatgagctcctgacctcaagtgagcctcccacctcggcctcccaaagtgctgggattacaggcatgatccacagtgcccagccttgacccacattttttatggggaaaagagggcggtgggccctttgcagcctgagttttcactgcacgttggagcgggaggggtctgtggtgggtggaattgggtcctccccaaatgcatgtctacgtggagcctcagaatgtgaccttggttggaaagagggtttttgcagaagtaattaaggaaagggtccaaatgagatcatactgcattcgggtggccctcactccaatgactggtgtctttttaagatgagagggtgcacagaggcacatatacagcggaggcggccacgtggagacagaggtgaagactggagtggtgcagccagggaactgccaaggtgccaggagccaccaggagctgcaagaggcaaaagaagattcttccccacagagggagcagagcaccgcagacaggttgatttcaggcttctggcctttaggactgtgaaaggagacggttccactgttttaagtcacccagtagaaggtcattcattatggcatccccagtacacgaagagtctggcttcatgattggtctaggttggtgaaggaggacacggggtcctctgaggccattgtggtggcactgagtagcccaagggacccttttcagcatcagaatggtgggaagtggtgtgcagaccaaagccgcgaacacgcagagtgggaggactggggtctagcagcctgctgggagggcctgtccaaccaaagaccttttgatctacaaatttttttttttttttcgagacgaagtctcgctgtgtcacccaggctggagtgcagtggcgcaatctcagctcagtgtaacctctgcttcccatgttcaagagattctcctgcctcagcttcttgagtagctgggattacaggcacaagtcaccacacccagctaatttttgtattttttggtagagatggggtttctctgtattggccaggctggtcgcgaactcctggcctcaagtgatcagcctgcctctgcctcccgacgtgctgggattacagatgcgagccaccgcacccagccaatttacaaatattttgaaaatgctacttatgaatggcccaataattttacttctaggagtttatcttaaggaaaaaataaaaaattcagatgaaaccttatccccctagatgtttatcaagacactattttttttttccagggggtgcgatcttgctctgttgcccaggctggaatacagtggtgtgatcatggctcactgcagctggaacctcccaggctccagcaatcctcccacctcccaagtagctgggatcacaggcccgcgccaccgcatatgcccagctatttgtatttttagtagagacagggttttgccatgttgcccaggctggtctcgaactcctggactcaagcaatcctcccgcctcagcgcctggcccaagacactttttttgtttttttttgagatggagtcttgctctgtcacccaggctggagtgcaatggcacgatctcggctcaccgcaacgtctgcctcctgggttcaagtgattctcctgccttagcctcccaagtagctgggattacaggcacccattaccatgcctggctaatccaagacactatttataagaaaacctagaaccagtctacacatccaatagtgaggaaatgattagatgaattacagtacatccacaagatggattactaaacagacattggcatgatttatgaagagtgtttaatgtttacaaagagcttttaatgatgtggaagatggtggtataataagtaggaaaaaactggttataaatgataccacaatatgatgtcaacgatgaaaaaatgcacaaaaaaagacttttttaaaacgtcgaaacatcagagtggtctctagttggaggaataattttttttttttttaagacaaacttcttcatactttttgtacttttaaaatgatttactatgtacatggattacttccataatcaagaaaaaaagtaaaaacttttaaaatgctgtgaacgtggtttccatttttattttctctgatgggtgactgcacatcagcatcttgagttatgctaactacttaggctggtcacgacacacacacacatacagagaagtcacacaggctgtaccgggctggctgttgcaaatgtacatgaattacacgggttgaagttgtttggcagctagttaacatatgccacccaatgacgggacacaatctggtcacacgctgcctctcctgcctgttgctgttctttacaaaggtccgtgtgtcgggctggcaaagtggcatcctgctggcatctctgtggtggccccggaatggtggagtgcccaggtcagcatctactctgggtcccattctcaactgctctggccttgacatcagagcttccggttccctgctggctcttctgcacactggatccatgccagtccaggccccctccaggcacacacctgaggcagactgagagcacaatggacgctgtcctgatgtgaactgtgcccagacacaggatggggggaagcgggagatgtgaccacgacaccacacacaagctcgatctttacagatgggccctctgggactgctatatgggtggtgcccgagagacacgggggccatgtggagccctccagggcacagttgctgggagaggacagacgggaggggacctgtgcccatgtgcctagctctgagagcagagctaggagggtggatggggaacgtgtccgacatggtgctagattgttgagaagtcacgactacacacagctggggagcatgcccctctcccagttcattcacacggtgggttagatacagctagagagaagtggagatatgcttttttgagggaggacctttcctggtgtttggataaacagtgagacagactcctgggttcggcatgctctggggaggaccatgcgacggtgagagactccctactgctacactctgtacagggtggccaggcccgcctgccgtgcccatggcctctggtgacagtcacgggcttgccttcaaccccttctgccttggagagctcttgggccccggtgaaatgggggctataaagacaagagggtgggggggggtccccatggcccagggcaccccacgtgggggctacatgatgttgcactgggtggccccgcaacaatccttgatcagtgccagccccgtcttggccaccgtgggcttgctaggtgggggctctgctttcttctctgcccgggagcctgcagcaagatgtgggcacagggagagggggagaaaggaacagagagagagaggtgaggtgagcagagccctgaccatctgcagcccagccccactgcaacccctggccaggtcttgttccaggccttgttcaggtggtatggagagctgatgcacatttcatatgatcctcagctggtcctcattttatagtcctcattttatatggtcctcaatgctcagcttccaaccctaactttcagcccttctcctagtcagctgttatcatcattgtacctgccaagcctagcacagggcctgacatccaagaagtatttggtaaatagataaatgggaaattttgttcaagtcacttcaatctgagggctcatatttttcaatttttgaaaatgctcatacattgtcttttcagatacctccacctcccattctctgttttatctcctagaatgcctatcacatgtaagttggaccttctcactctatcctctcggttttataacttctctttcatatttctcatctctttttctctttgtgctgcattctgtgtaactttctcagggctgtcttccaatgtataaattctcccttcagctgtgtctctgtatttaatccattgagtttttactttattgataaaaaaaaatttcagaaggccagttttttgcatgtctacttattcttttttcatagcatcttactatttcattttgggttttattccttctcttagctctttgatcatttaaaagtacttagtttattttcctttttaaatagttctatatttttggttcttgggaggacattctctttggtgcatctactgattctcctcatggtgattcagttcttcatgggtttttcttttcttttcttttcttgagatggagtctcgctctgtcacccaggctggagtgcagtggtgtgatcttggctcactgcaacctccgcatcctgggttcaagcgattctcctgctcagcctcctgagtagctgggattacaggtgtgcgccaccatgcctggctaatttttgtacttttagcagagacaaggtttcaccatattggtcaggctggtctcgagctcctgacctcatgatctgcccaccttggcctcccaaagtgctgggattacagacataagccactgtgcccggccgggtttttcatttttattgagggctcatcttcaagggggttgcttttttctgtgagaatactgtataccatgggatccagaagaatccctactgagcagttttgcatttgctaaatctgctaggatcccagagatttcactggttttacaatagtttttatttttcaacttggaattccagtaccagatgagtagtgtaaagttggccccttgcatgtggtgcatgcttggtgttttgatttctcgccagaatcatttcttttttccacccataatccaatagagaaggcaagtttccttgctcctcctccatgctgctaagtggagtttttctaccttgcctttcatgaaagggtccactgaggatgctggccttcggcagtgatcacgtgccttgtggttataggagccagcagaagagatcattgcccttctctttccttactccctccaaccatctttcacaggatgttaatgaaaactgggtttgtagttttatagacagtggcagcttttggtttttgtcttcccagcaagatttcaagtccctcttcctctaacagctcatgtccctgtggctgcaggagtgggcatgttatacattcctggccaatcccagtacccccagcctcttggtgatggtaatggatctaagaggtgggaacataatcccagaagggcgggtgagaatatttccctgagacttatgtatttcgataccagggaaaagaacctgtggtattgcttcagagttgctaagctatggttctagggttctggtcccatggagaaggcctgtgttgtaggaaaaaatgatgcttacatgcaaagagaggcagagatgagaaaaagaagaaaaggaggggaggtaatagtgttcagtccttgaggctctagttcttgttgctctttctccaacaaattcctttttttgcttagaccagtttgaattgggcatccatttcttttctttctttcttttttttttttttgagatggagtcttgctgtgtcacccaggctggagtgtagtggtgtgatctcggctcactgcaagctccgcctccccagttcacgccattctcctgcctcagcttcccgagtagctgggaatacaggcgcccaccaccaagcccggctaattttttgtatttttagtagagacggggcttcaccgtgttagccaggatggtgtcgatctcctgacctgtgatccgcccgcctcggcctcccaaagtgctggcattacaggcgtgagccaccgcgcccagccaggcatccatttcttctaactgaaagaggcctcactaatacagcagttaaacacatttgagaaacgctgggtcaacaaagaaaagacagtttcttgacagcaggatccatcatcactttaatatcctaatggacactgggactctccaaatacagggtcaagtaaacagcatttctcaaacttatttcatataaaaccctctttgctctgaggatctgatgaggttaatattctgagacatatgcttctggcttctccagagattccagacctaagagaggccagagctccctgagcctcagtagctacccaattctttctatgaaatgcaccaaactttgcaattagggaggaacaactaccaggaccaggtacgtagtttgcagagttcaatccaatatgaaaatgtagggccccatgttccaaacgtattaacaatttctagacagcaacaggagaacattaaaccaagcatggcacccttctaggcatgaggccccaggcaactgcctacaggcccatgaggctggtcaggcatgaggccccaggcaactgcctgcaggcccgtgaggctggtcctgcctgctgtcatcccatgctgaaatctgatctctagatctgatctctagaaagcattttgttgcgccccttatggctcccagacttctctgaaatggcctttttttttttttttttttttgagacaaagtcttaccctgtcacccaggctggagtgcagtggcccaatctcagctcactgcaacccccacctcccgggttcaagcaattctcctgcctcagcctctcgagtagctgggatttcaggtgtgtgccaccgtgcccagctaatttttatatttttggtagatacggggtttcaccatgttgaccaggctggtctcgaactcctgacctcaggtgatccacccaccttggcctctcatagtgctgggattacaggcgtgatccactgtgggcctggcctgaaatatacttttctcttttgtgggggaggggaatgaataatgtatatactcactggctggagatttggttactttgtctagaggttttaacttgattctcaggaaatcagccatttccttgtcttcttcttgctccctgtgaaagtagatgggtaaaagaaaagaagatacacagcaagcaaggaaagcatcaaggaaccaatgaaataaaccaataggttaagcaacaggctttgtggatggggcatgtatgttgtcacgtgttatgcgtgtacagtatgtatatgttgtatctggtgaacctgctctgaaccagagacacatatcaatgatggggtaaatgcttacccagaggtaggtatgtgaccccagggcagaggcagggacattacaggaccctgctggggggtcagtgagtgaggcagcacctctcctgaccttgtattttgaagccaccctattcacctgtgctcccacaaagtatgaggcaggtctcagagagcgagtcaccccagctcttccaaggatcaccaagataaagtaggtgggtgcagacttgctgaactgccttgaagagacacggtctttctttgccacccaggctggagtgcaatggtgcaatcgtaactcaagaagccttgaactcctgggctcaagagatcctcccacctcagcctcccaagtagctgagactacaggagcactccaccactcctagttaattaaaaaaaaaaattgtagagataggggggtctcactatgttggggcagcttgtctgcctgcccaagactggcattgataatttcttctagatctggaagcagaaccggaggtaaggagaatataatatttgttgtagttttctgtattttttgttttgttttgtttttgagatggaatctcactctgtcacccaggctagagtgcattggtgcaatcttggctcactgcaacctctgcctcctgggttcaaatgattgtttcctgcctcagcctcccaagtagctgggattacaggcatgcaccaccacgcccggctaatttctgtagttttagtagagacggggtttcaccatgttgcccaggctggtcttgaactcctgacctcaggtgatccacccaccttggcctcccagaagcgctgggattacaggcgtcagccactgtacccgaccatagaatataatatttggataggagggaaaagttggtttctctcattaaccagaagtccattgcagcatgaagaagggcagtggaactgctagtcccaggacccttgaagaaaggtctctgagaacacagacaataaagagcaagttgccctctgggttggaagggcctttttccttgtgaaaggccctaaaagctttgctctggtgtaaggaaacaaaaatcaagaaccaacatgtacagctttccacattttcaacatttacaacatgtttttacactgcagctccagggctgtggttgtcgaggtcaaggcagcagatgcaaagagaagaccctgatacttagaaaagggcattggcgccactaaggggaagggaaaggggagaacaaagctgggaggttgggaggacagaggttgggagcaagtcagttcaggtggcagagtttcggtagaaactgatagcagaagtttcaagacattgccttcaggagtgacaggatgtgaaggaagctctgccatgtattatgggatgtgactcctccctggtcacttcctggaacaacattccctcaagaggcacagatttgaaattctcttatatacaaaatgaattctcaagccagaaggctggggttccttgggattcagtgtccagagactgtggatcaaggccatgcctgttaggcaaggctgtgagtcccaggagcagaagatgggttctggaaggaagcagaaggttgctgtcctgcagcccagtgatcgggtacccgcagtgcactcaccttaaccgctcgacctccgcatcgtccaccaggaagtctctcttctgcaccagtttgtggatcttctggattagctcatcctctctctgcttctgcagtttggttttttctttttctggaaagaagacatcaacaaggagacagatgagcattttgggaggctgaggtgggcggatcacttgaggtcaggagtttcagaccagcctggtcaacatggtgaaacaaccccatctctaccaaaaatacaaaaattagccaggcgtggtggcacacacctggaattccagctactcgggaggctgtcagccaccacctcgggaggcgggagaattgcttgaacctgggaggcggaggttgcagtgagctgagactgcgccactgcactccagcctgggcaacagaatgagacttcatttcaagaaagaaaaaaaaaacaaaaaattacagagagacagatgagagggtgaccactaaaagcacttgagctggccgggtgcggtggctcacacctgtaatcccagcactttgggaggccaaggtgggcggatcacgaggtcaggagatcgagaccatcctggctaacagggtggaaccccgtctctactaaatacaaaaaattcgccgggtgtggtggcgggtgcctgtagtcccagctactcgggaggctgaggcaggagaatgacatgaacccgggaggtggagcttgcagtgagctgagatcgcaccactgcactctagcctgggtgatagagcgagactctgtctcaaaaaaaaaaaaaaaagcacttgagctgagcggccaggattgattggagacctgactctgcccttccaccctctggatgaacttggagaagcaacttgacctcttcaagcttcagttttctcatctgtaaaatacacagtgaggcttaaaatgggagtaatgggctgggcatagtgcctgccacctgtaatcccagcactttgggagaccaaggcaggaggatcacttgaggccaggagttcaagaccagcctgggcaacatagtgagaccctcctatgtctacaaaaattttctctgtaaattagccacatgtgatggagtgttcctgtagtctcagctacttgggaggctgaggtgggtggatctcttgagcccaggagttctaggctgcagtgagttatgattgcaccattgcactccagcctgggtaacagagaaagaccctgtctcttaaaaaaaaaaaaaaaaattgagagggcagggtgagtgtggggagggagagcatcaggaaaaatagctaatgcatgctgggcttaatacctatgtgtcgggctgacaggtgcagcaagccaccatggcccacgtttacctatgtaataaacctgcacatcctgcatactaaattgcatacaattttgaaatgcagtagtgttagtaaatggcttagtggagtgcttggccttggctgagagccttcagtaaatggtcatgacaaagccagggtcttctgcaaaggcagggggtgaggagaggctcagataggggtgctgggagggaactagttgtttttttccctttggtgaaggtaaaccaatttatcagaagaaaatcatccatgccaatgacactaaccctgtcccaaacaccaagtgctaggatgccaaagagaaaaaataaaaaaaagagagagggctgaagatgaggtttgagaaaattaagaggcaaaaacttaaacccacttgggctctttctgctcaaatcccttcagaataaaaaatgtgggacagcttgtctgcctgcccacgactgacgttgatcattttttctggatctggaagcagaaccaggggtaaggagaacataatatttggataggacagaaagttggtttctctcattaaccaggagtccaccactgcacgaagaagggcaataggcttgccagccgctccccattcccagccattggtgcattggatgatggtgtcactgctcctgccgtggtaaatcttgtgggttgggtctgattccccaaatcactcgtcagcaccgcagagccgctccctgccctctccaagcacgcaccaacacccatcgactcaccaggacccctgctcactcaggagctcgtggtgtgactttactctccaaataaccattgacagcactctgacattcccaagtgccctccactgctctctagatcttagccagaatcacccaacaactggctgggcccccaacatctgcaaacctctgtctccaagccattcatccatgtgttctgtcactcaccaatagaggcattccccagcctcagctgcagcaactcccaggagaaaccacctactcacacaagtggcctgcgtcagctcacagacctatgactagcccaagtctccaagtcattggccaatgctgctcacgtgcgtgtgtgccacatacctttcccatcatcttccacttgcctacaggtgccacccactgaaatcctaacctccatggtcatagtattaagaaatgaggcctttgggaagtgagtagattatgaaggtagaaccctcatgaatggaattagtgcccttataaaagagacccaagggagcttgtttgccccttccaccacacaaaggcacagtgagaaggtaccatctataaggaacaggccgtcaccaggcactgtatctgccaacaccttgatcttgcacctcccagcctccagaactgtaataaatgttgtttacaagcccccggtctagagcaagccacagagactaaggcacccccaaagttcatgtgtgccctatttggaaatagttttccccagtttatatctcttctatttggaaatactctatttccaaagtaatttgtaagttgctttgcacatgtaattataatagttaagctaaaatgaggtcatacttattagcatggaccctaaacccaatgacttgtgtccttatgagaagaggaaagagacccaagcatggtggcctgaacctgtaatcccagctacttgggaggctgaagcaggaggatcacttaagcctgggagttctagaccagcctgggcaacacagccagaccctgtcttttagaaaaaaaaaaaaaaaaagaggagaagagaagacacacagacacacacagggtcacgtgaagatggaggcagagattgaagtggtgcaaccagaaggcaagcaatgccaagaattgtgtgtgttactgttagagtaggtagccaggcagccatgagcaagaaaggagaggggatttcccccccaaggaatgccaggcaaccatcaggtgatgtcaggcagttgttaaaattgtctctctaaaataataattggtcacagctggtgccagggaaaggccatctcccaacagacagaaaacacctgaagttatcagcggtttcccgatgagatctcaggagttgggcaactgggctcaagcatgcacattaagaggcaaaatggcggagtctaactggtatatgaccttcctctaggaacactcaactggtgagggaaaaacatctcaaataatcaggcccatgacttctgtaaatacactgtgtttgcagcctctcccaagcgctggcaggccactgcgcatgcgcacaacctgccctgagggaaaatgaagggaggagagacataaaaccctggaatatgccaacatataaaaccccggaacatgccaacatataaaaccccaaatcaaaggtcaagcggtgcacttggatctctcaaatcacccacttggccgtcttccaagtgtcctttactgcctttcattcctgctctaaaacttgttaataaacttttgctccttctctaaaacttgcctcggtctctcactctgccttatgcccgctggtggaattatttcctctgaggaggcaagtatcaagttgcttcagactcgtatggatttgctactgctaatgatacaggagtgaagaagaaattatttaggcagatagggtaaggaagtcctcggtaaggttttccttttaatgaaaagcaacccccaaatcattttcttttctaacaaggagcagccagtaaaatcgagctgtagacatagtcaagggagctggaagcttacacgggtgaatgctggcagctgtgcccataggaaaaggccacctggtctaggtatgttcaaaatggcggctccacgctcccttctctttgccagccatgtgtacagtaaggagaagacaacatggcgccgcccaagtggaaagttcatttgcatgataagattagggtggggtggccagccttcccatgcactatgcaaacgtcacacctgctccaaccaatctgtgggccctatgtaaatcagacaccacctcctcaagcttgtctataaaatttggtgcagtctgccacaggccggaattcccattcagggacttctcgagagagaccgagagagctgttcccttttctctttcttttgcctattaaacctccactcctaaactcactcctctgtatgtcagtgtctgtgtccttaatctgcttggagagagacaacgaaccttgggtatttaccccagtcaacaacactacttcactaacactaccagaagctaagaggcaaaggagtctcctctagagccttagcagggaacaaggccctgttgacacctcgattttggatgtctggcctccagaaccgaaagagaatacatccagaaccgagagagaatacatttctgttgcttaagccatccagtttgcaccaatttgttaggcagctctgggaaatgaatgtaatgccctagggcttcaggagactccactgtccttccagtaattgtttgttttgtgcttacataagcttggatgggtttctgtacctttcagccagactaatccttggagaattgtgaaatgagagaggggaacaggcctggcggttcctaaccgtccctgcttatcacaatcaggtgcaaagctttaaaaattgccaatgctcggctaggcgcggtggctcacacctgtaattccagcactttggtaggccgaggcgggcagatcacgagatcaggaggttgagaccatcctggctaacacagtgaaacccagtctctactaaaaatacaaaaacaaaatttgccgggcatggtggcgggcgcctgtagtcccagctactcaggaggctgaggcaggagaatcacttcacttgaaccccggaggcggagactgcagtgaacccagatctcgccactgcactccagcctgggtgacagagcaagactctgtctcaaaaaaaaaaaaaaaaaaattactaatgctgagatggatcaggtgaggcaggagaatatggtctggaggcagggaacctagggccaacttcctagaactaaatcaaaagaaaaaccccaactttccacacataagtaacaaaaggactggaggctactccctttgcaaaccctcctccttttctgtgtgtcacatgagaaattgaaagtatatctgattggtcgcagaaagcaactgcaaaagctttctgcgaccaatcagactaattgtgggccactacttcatttacatagggtgtacaccaagtagccaacgggaaacctctagagggtatttaaacctcagaaaattctgtattggggctcctgagcccctatgctcaggcacactcccaccctatggagtgtactttcattttcaataaatttctgcttttgttgcttcattctttcctcgcttattttgtttgtgtgtgcattttgtccaattctttgttcaaaacaccaagaacctggacaccttccaccagtaacacagggactcccttttggggtctgtgggagacccccaccccaagcatggaaataaaggaaaatcttgagttccctcaaaggaaattctaggcacctagctagccttgaaaagtcaataagcaacttatcagtaagaaggtaatagtagcctaaaacaatagccaaggaagttagaatctggagatgttttgttttctatagaaactgaagataaacatcttagcatatatgtctgagttgtttttcagaaacccaggaccctaccaaatggatccactggcatatagacgtcagataaaggaagactaaggactgaattctgaccatctttccttgttctaagtgtcttccagagaggcctggagggagtcacacccatgggccagggatgccattcttttctgctgacccccgatttttattatttttatttatttatttatttgaggcagagtcttgctttgtcgcccaggctggagtgcagtggcacaatcttggctcactgcaacccccctctcccgagttcaagcaattctcctgcctcagtctcccgagtagctggaagtacaggcaggcgccaccacacgcggctaatttttgtaattttagtagagacgggggtctcgccatgttggccaggctggtctccaactcttggcctcaagcaatctgcccacttcggcctcccagggtgctgggattatacgcgtgagccactgcacctggccttgacccccgatttttaaacaaagcttctcttccttaaccaattgcaaattagaaaatctttcaatctacctatgacctgtgagccccagcttcaacgtatgcagcccttttaggccaaaattgatatgtaatctcaatgtattgatttacaattttgcctgtaacttctgcttgactgaaatttacccctgcctttaaaaacctgcactgaaatcgccattgcaaaattataagagacagtgaaagagatctgacctaatcaactccatcttgcttctaacctccaagctgtccttgttcattactgggcataggctgaactaactatgggaggaacttactttatcatttaaaacaaagacgataacagccttttcccaaaacaaactcccttcttgcctgggaactagactgcatttgtaggtgatacggttaggctttgtgtcgccacccaaaactcatcttgaattataatccccatcatccccacgtgtcaaaggagagaccaggtggaggtgactgaatcacgcaggcagtttccccatgctgttctcgtgatagtgagcgagttcccatgagatctgatggttttataagggttgggcagttcctcctgcgttcattctccttcctgtcaccttgtgaagagagtgccttgcttctccttcaccttccaccatgattgtaagtttcctgaggcttccccagctatgccgaactgtgagtcaatgaaacctctttcctttatacccagtcttgggcagttcttgacagcagtgtgaaaatggacttaacaaattaaccagaagattaggaattatgatagtgagtgagttccatgagatctgatggttttataagggttgggcagttcctcctgcgttcattctccttcctgtcaccttgtgaagagagtgccttgcttctccttgaccttccaccatgattgtaagtttcctgaggcttccccagctatgccgaactgtgagtcaatgaaacctctttccgttatacccagtcttgggcagttcttgacagcagtgtgaaaatggacttaacaaattaagcacaagattaggaattatggtttaggaatcatgcagctggaggctacaagatgctgaccctccccagattactcctgaagataacaccactattgtaaaaaccaagatcaatgcttgaggtattttgcagaccgtgcacttgatgggtcagtgggtaccacccagataaagtggctcatctgaccttgtggccccaacccaggaactgactcagtgcaagaggacagcttcggctccctgtgatttcatctccgacccaaccaatcagcactccattctcactgcacccccacccccatccaccaaatcgtctttaaaaactctgatcctggaatgctcaggggcactgatttgaggaataataaaactccagtctccctcagccggctatgcatgaattactctttctctattgtaattccccagtcttgataagtcaggtttgtctaggcagagggcaaggtgaacctgttggacagaacattacctataagccattgaggaggtcaggcttgaagcattagctgcccagtcctcctggcttggagccttgcaaataaactgtttcctttttaccactgcaaaaactctggggagacagctggtcttactgtgccaggaaagcagaccctagttgtattagtccattttcacgctgctgataaaaacatacccgcaactgggtaatttataaagaaaaagaggtttaatggactcacagttccacgtggctggggaggcctcacaatcacggcagaaggcaaaaggcacgtcttacttggcagcaggcagcacagaaaatgagaatcaagcgaaaggggaaaccccttataaaaccatcagctctcatgagacttcttcactaccatgagaatagtatgggggaaactgtcccccatgattcaatcatctcctactgggtccctcccacaacacacggggattataggagctacaattcaagatgagatttgggtgggaacacagccaaaccatatcacaagttgagttctattacaatgccagagtccaaagccaacaatgccagatcaattgcattggggtttctagtgggtggagaatagactttggtacttttccctcattccttcgttgttttatgtttgacatttaactttttttggtaacagctttattgcaatatgattcacataccatgcagttcatctgttccaagtgtatttgcagagttgtgcaaccatcaccacaatccattttagaacattttaatcacccccagaagaaaccccatacccactagctgtcgctctctttcaactaggaaagtctattcactcgtttatccttagggcctacacagtgctgggcacctagtaaatgctcacgaaagctagaggattcagttctactgtcattgcgcacactacccttacaacaagactgtgtggaagactcctacaccttgcctttgttatttatgggatattcacaacaaccatgcggggggtagtattattggcctcattttcccaacaaggaattcaaggctcagagaaattaagtcgcgaactttcacgaagttcacctgcctgctaaggctgaattcaaacccagattgctgcactctaattactaaagtagtagttcttatgtgggagctgtaagctgcaaagtgtctgagaaggtctcaatcaatctggaggtttattttgccaaagtcgaggaggcacctgggaaaaagagacacaggcagcaataggatccccggcctgtgcttttttctgcagaggatcttaaggacttcaatatttaaaggggaaagagagggcaggaaggggaggattgcattctctggccctcagtgaatttgcattttacataggataaaggaaacgcggagtagaggaggaagtcaaatgtgcatttgtctccgggtgggcggagggacgatgatttatagtcttgtcttagtcccctacctgttaggataagctgttaatttacattgacagggtgagggaggcccctgggaagataggtggcctttctatcttgcagctatctgtttaggaaaaaaagaaaggcagttttggctgggtgtggtggctcacacctgtaatcctagcactttgggaggcttgaggtgggtggatcatgaggtcaggagatcgagaccatcctggctaacacggtgaaaccccacctctactaaaaatacaaaaaattagccgggcgtggtggcaggtgcctacaggctcccagctactcgggagactgaggctgaggcatgaacccgggaggcggaacttgctgtgagcagagatcgcgccactgcactccagcctgggggacagagcgagactccgtctcaaaaaaaaaaaaaaaagtaggtttttgtatgactcatagttcccaagcttaacttttccttttggtatagtgaattggggtcctgggactttattttcctttcatagggcaatgttgcacacccccctgacctcgcttggggtacattcagcaacatctgtacatctatagacatttttggttgtcactgtcagaagggtttgaactacagtgactccatcttgaataggggctgggtaaaataaggctgagacctactgggctgaatgcccaggaggttaggcattctaagtcacaagatgagataggaggtcggcacaagatacaggtcacaaagaccttcctgataaaacagcattagtaaagaaggctgccaaaacccaccaaagccaagatggcgatgaaagtgacctctggtcgtcctcactactcattatatgctaattataaggtattagcatgctaagaggtactcccatcagtgccatgacagtttacaaatgtcatggcaacatcaggaagttaccctacatggtctaaaaaggggaggaaccctcagttgtgggaattgcccacccctttcccagaaaactcatgaataatctaccccttgtttagcatataatcaagaaatagctataagtacaatcaatcgaggagcccaagctgctaccctgcctacagagtagccattcttttattcctttgctttcttaataaacttgctttcactttacggactcgccctaaattctttcttgctcttggtccaagaactttggggtctggatcaggatccctttcaggtaacatcaccattgaggggtagcggagaggtacgttgtgctaatggcctgtagtgggtagaggccagggatgaaactcaacatcccacaagacacaacacagagccccgtacccccaacaaaaaatgatcaaccccaaaggaagatactgacatttgtcaaccccaaatgtcaatagttgaaggttgggaaacgctgctttaaggctcatcatgctgcacttgtagctcagtaagaactgccacttatgggcacccactgtgtgctgggcccagtctctttctgctaacctgggggctccttgagagtggagaaccgttctctgttcatcactgcaagcccggctcctaggttcagagcttgctgcagaacagcctcttgggacatagttattgaactgacagcatggcaaaaacattcaagtcaagggtaatggtgggtgcttatctggcctatttgaaaacacctttgcaaaaatgataacagtgagaaaattaggacagtgaaagggatctgatctaaccaacccccatcttgcctttaacctccaagctgcccttaatcattcccaggtttaggccatgctagctttgggagacatttagtttatagtttaaatgattataaccttttccaccaactaaactgcctttgtaaagctaataaaaggcccccatgttagaaggatgggaggaggctgaattctgctaaggtgtagacataaatgactactgccattattccagaggtcacaagatttgcaacttccccaattactcctgcagataacatcactattgcagaatctaagatcagccttttgagatatctctttaggttttgcatttctgatgaatgatgatccacgtggacctgccacccagaagtggacttagcacccctgagaatcatttttcacacacctatgattgcatccccaaccaatcagcagcatccattctgatatagtttggatgtgtgtccccgcccaaatctcatattgaaatgtaatacccagtgttggaggcgtggcctgatgagaggtgattggatcatgatggaggtttctcatgatggtttagccccatcctccttggtactgtccttgtgatagtgagttctcatgagatttggtcttttaaaagtgtgtggcacctcccgcctcactctcttgctcctgctctgggcacgtgacatgtctgctcccttgtcttccgccatgattataagtttcctgaggccttccagcagctgagcagacaccagcatcatgcttctggtacagcctgcaggactgtgagccaattaaacttattttctttataaattactcagttctctctttcttttttttgagtcggagtctcgctctgtcacccaggctgaagtgcagtggtgagatctcacctcactgcaacctccacctcctgggttcaagcaattctcccacctcagcctcctgagtagctggaattacaggcacccgccaccacccctggctaattttcatatttttactagagatggggtttcaccatgtttgccaggctgttctcaaactcctgaactcaagtgatctgccctctcagcctcctaaactgctgggattacaggcgtgagccaccatgcctggcctgggactagcattttgataagggtaagccccacagagggcaactaacacagcctgatgggcaggggaaaattttttggagaagatgccaaataagtcaggcattattaactaccaaatctggggtgacttcaaagttagagtttgtacacacttcatctgttcccaagtaggataataatggtcataattgctaatatttactggactcttgaggccaaatatcaagctaagcacttagtttgcatcatctcatcgatttttatgatatttaatttaatttaattatatatttttttgagacagtgtctcgctgtgttgcccaggctggagtgcaatggcacaatctcagctcactgcaacctccacctcccaagctcaagtgattctcctgcctcagcctgccggttacctgggattacaggtgtgtgccaccacacctggctaatttttgtatttttagtagagatggggttttgccatgttggccaggctggcctcaaactcctgacctcaagtaagccacccatctcagcctcctaaagtgctgggattacaggcattagccaccgtgcccagcctctttaggatatttatactcaatgaattagaccctcttactattactagccaattttcagaggaggagaaattgagtctcagagaagtacagtgacttgtccaaggacaagaaggtgaccagaattcactaggacttgaacccaggtcttcctgactcgaagttgtgtttgacacatgcagtcagggagcactgcattgcaagaatgaggctctgtcttccagacccaggcgtacagatgggccaggctgggggcccccaagcacctgtttagcacaaggtgaagttgcaaatggttacctgggatggcgaccaagttctgcagctcctgcttcaagtccatgatgtccttgcagagctggatgtcatccatcctggggaaacaggacaccatcaacagcaggttacatcagcagagcattacgccctgagcatcacccggttaacacaaagaagctattaaaggtgggttatcttttgaagaggccatacatgctcattgtagaggttttccctcaaaaggaaaaagccaaacactgctcaattatcccaccacctagaaatgatcactgttttttgtttgtttgtttgtttgtgacagagtctcactctgttgcccaggctggagtgcagtggcatgatctcggctcaccgcaacctccaccttccgggttcaagcgattctcctgcctcagcctcccaagtaactgggattataggtgcctgccaccatgcccagctaactttttttgtatttttagtagtatttttagtagagacagggtttcaccatggtggccaggctggtcttaaactcctggcctcaagtgatctgcacacctcagcctcccaaagtgctgggattacaggcataagccgcggtgcctggccatcagtcactgttaataacacctcgatagagctccttccagtcttcatgtgcctgacttaggtttgcttatataagtgggttcatatggcatattcagtttcgtttttcagctaaagtttacgttttttaaacactgcagaaattcacaacatagaggaaagtctccctctgtccttcggagagaatcattgtcaacggtttagtatgtattcctctggattttttaaaaacatttttattttgaaaatgtttaattttttattttttatttttggagatagagtgtcgctctgttgcccaggatggagtgcagtggcgtgatcatagcttactgcagacttgaactcctgggctcaagggatcctcccacctctgcacaacccctcccaaccccagccccctacggagtagctgggactacaggctaatttttaaacagttttttgtagagagagggacctcgttatgttgcccggctggtcttggattcctggcttcaagcaatcctcccacctcagcctctcaaagtgctgggatataggtatgagccactgcacccagcctcctccagatttaaaaaaaaagcgtatgcttataatatcatatatgacaccattgttattgcacaaaaattttttgcaatttgcttttttcaatttaataatctttaatagtcttgatcatctttccatatcagtatatgcaaatctccacatatttagtggctgcatagtataccattatattgatatacagtcatctatttttattttttaaatttatttttatttttattttttttagacagtctcactgtatcacccaggctggagtgcagtggtgtgatcttggctcaccgcaacctctgcctcccaggttcaagtgattctctggcttcagcctccagagtagctagtagctgggattacaggcgtgagccactgcactcagctgattatacagtgatctatttaactataatttatttaactattcccctattcatagacatctgggttgtttcctaatacatttctaggatagattcatagaaatgcaattgctgggtctagtggcatgaacacttacattgtagtaggaatttccaaattgccctccggagagatcatgtgtgacattaccaacagtgtggccatgggggacagtgggtgctggctcctgtcatctcagtaattgggttgcttttgcaacctagttttgcattacacattataattttgcattacacattatggttttgtgtgtgtgctacaaaaattaactcatcttgctgtaaacaatatttgtaatggctgtctgcaatttcacaaatgagattcatcgggattgtgctaattacaccctcatcttgattactaaggctggcttttcaggtttgagcaattttggccactgcaggatgaacatcagttcctctaaggcttcttctccatgttggattatttggggtttagattctcagaagtggaatcactgtgtacaaagggcttgatatttccatagctgttgagatgtatcttcaaataacttccccgtgatacacaggttcacattcactctgcgtgtctttgtctttgttgttcttgttttgttttttgagacagggtcctgctgtatcacccaaggcacagtcatagctcattgcagccctgaactcctgggctcaagtgatcttcccacctcagcctctgaagtagctggcactacagctgtgcagccatcatgcccagctcatactttttttaatttttaaaattttcatagagatggggtcttgctgtttaccaggttggtcttgaactcctggcctcaagtgatcctcccgccttggccttccaaagtgctgggattacaggcgtgagccactgtacctggcctgcacgtctttattgaacatctactatgttgggcattgttgtcatctctgaggcttgcaacagcaaagaagaccaagccctcaggaagatgacattttgctagcagagacagaaggtaaacccaaatacaatatttcagatgttacaaagaagactgaagcaggtaagggatgtagtgggtcagcttggagccagtatcttactttgctcctgacaactatcctaggaaaaaccagaggacagaaatcatattttcattttactcatgcggaaacaggtaaagaggctcaactgagtacacacagctcatgggggcaggaccagaactagaaatcgacccttcggagtctgagtccactgatctttctgcctcgttcctcagcgtctccatcaagggccggggctgctgactcctttcagcagtgccatctgtataccagcatggggccctatcttagtcccctgagtgttgctatcaaggaatgcctgtggctgagtgcttttttttttttttgcataaaggaatataaaactatttattaaccactgttcaccagtatttacgataaagtaaacaatatacagttggataacattctgattactacaaagttgttcttcctggcttttgctgaaccagtaaagcaaactgaagattgaggctacatgtaaggaatgagctggggtaaagaaaaaacatgcaggtcagtaggttagattacaaaaggttgttcacacatttatggcagcaggtcctaaactgccagcatctctaaccatctgattaggtttctatgagccaagtcttacatattccattcaacatgatcttttagtcaatgtagcaacagggatttcaacattttgttaaggaatggcccactagggaaatttttaaatattcatttaacttagttttgtttagctagttaaaacacactagcatttgtcttgttttctcatctggatgtggaaacctgctgtgatggcagtgataaaatttttcctttcaggaattttgcaaataaaccaattatagacgctttaaaattatccaatttaaattgtcctatttagaattacttatttcacttgaaatgtatggcttcaggaaaattttcaatttaccttgaagtgattatctcttatttagctcggaataatggcatctcagaaatatgggtttacctgtgattttttgtttgggtgaatgcttaaaaacaaaaaaaaatttatgtatgcattttatagatacacacacacaaaaaaacatgtaaaaaatctagaatggtccttaggcttatgggaacacaagttttgattgagtaatgactatggacatttcccccaacatttagaaaagctgttctttaatgaagaggaaataatatctttataaagacaagaggtttatttggctcatgattctgctggctggaagatgggacatttggcatgggcctcaggctggctacattcatagaaggtgaaagggagctcatgtgtgcagaagtcacagggcaagagtggaagcaagagagagggggaggtgccaggctttttttaacaaccagctgtccaggaactaaaagagtgagaactcactcacccccacctcccaggaagagcttaatctattcatgggggatccacccccgtgacccaaacacctcccactggggcctatgatgtagtttggatctgtgtccctgcccacatctcatgtcaaatcataatccccagtgttggaggaggggcctggggggaggtgattggatcatgggggtggacgtctcccttgctgttctcatgatagtgagttctcacgagatctggttgtttaagtgtgtgtagcacctccctctttgctctcttgttccttctccagccacgtaagacttccccttcgccttccatcatgattgtaagtttcctgaggcctccccagccatgcttcctgtacagccagtggaactgcaagtcaattaaacttcttttctgtataaattacccaatctgaggtagcctgtttaaaaatttttttttctggctgggcacggtggctcatacctgtaatcccagcactttgggaggccgaggtgggcagatcacgaggtcaggagatcgagaccatcctgtctaacatggtgaaaccccgtctctactaaaaatacgaaaaattagccgggcgtggtggtaggcacctgtagtcccagctactcgggaggctgaggcaggagaatgtgtgaacccaggaggcggaggttgcagcgggccaagattgcgccactgcactgggcaacagagcgagtctccgtcccaaaaaaaaatttttttgtttctttataatagagatagagttacaccatgttgcccaagctggttgccaactccttggctcaagcaatccacccacttcagcctcccaaagtgctgggattacaggcgtgagccactgcgcccggcctcaggtagttctttatagaaatgcgagaacagactaatttcaacatgagatttggaggagacagacatacaaaccacagcaggaccccttgccttttgccactcaagaacaactcatgctgtccattctaatgccagcatcccagtttcaggacaagaggcaggaatgccttgcttcagcctgcatctcttgttgtcagaggcacgccaagcatttttcaagtcgtgccctggaatgtcctagcaggtgacagctgcctcgaatgagcgtggacttgccgggagggcacagactgttcccgtgagtttctatcagcgatcgttcaactggagagactccagacgcttttgcagagatcaggctacatcagggcaatcttggtccccaggaacatttggcaatgcctggagacatatttggttattataattgagtgtgtgttggggaggggtgtggttgctactggcatctagtgggtagagaccagggacactgctaaacatcctactgtgcacagaacagctcccacaacagaaagtgagccagccaccatgtcaatcacactgaagttgaggaatcttggattctaaccacagaattatcaaattattgataatttttgagaggtaagagaggagaagatggagaaaggacaaaaggagagacaggtagtgattaggaggcagagttttggcaccaaacaactctggctcaaagggccatggtacagtgacttccttttctgtctcacctaactcatttttaattatttatttatgtttttttttttttttttgaaaaagagttttgctctcgttgcctaggctggagtgcaatggcgcgatcttggctcattgcaacctttgcctcccgggttcaagtgattctcctacctaagccttccaagtagctgagattacaggcatgcaccaccaggcccagctaatttttttttttttggacgagatttcaccatgttgatcaggctggtctcgaacacctgatctcaggtgatccacctgcctcagcttcccaaagtgctgggatgataggcgtgagccaccgcacctagccgtcatgttttaaataggaataatggcagtactatttgctgggattattatgcacatcaagcattaagcacagtgcctgggacctacacagtcaaatgcccagtaaatgctatctactattattatgttttttagagacagggtctagctctatcacccaggctggagttcagcagtgcaatcatagctcactgcagcttcgaacgccaggggtaaaaggatttgcctgcctcagccttccaagtagctaggactttaggcatatgcccctacactcagctaatttttaaattttttgtagagacagaatcttgccatgttggccaagatggtctagaactcctagcctcaagcgatcctcccatgtcagcctcccaaagcactgggattacaggcatgagccaccacccttggcctttactattattatcattagctgtgagaaagaagcagagaatggctgggtggggtggctcacacctgtaatcccagcactttgggaggccgaggtggaaggatcacttgaagtcaggagttcaagaccagcctggccaacgtggtgagaccctttctctactaaaaatataaaaattagccaggtgtggtggcacatgcctgtaatccccagttctcaggaggctgaagcaggagaatcgcttgaacccaggaggcagaggttgcagtgagtcaagatcatgccactgcactccagcctggccaacagagtgagactccttctcccaaaaaaaaaaaaaaaaaaaaaaaaaaaatggccggcgtggtggctcacacctgtaatcctagcagtttggaaggctgaggtgggcaggtcacaaggtcaagagatcaagaccatcctggccaacttggtgaaatcctgtctctactaaaaatacaaaaattagccgggcatggttggtagtgggcgcctgtaatcccagctactcaggaagctgaggcaggagaatacttgaacccaggaggcagagattgcggtgagctgagatcgtgccactgcactccagcctggcaacagagcgagactccgtctcaaaaaaaaaaaaaaaaaaaaaagcagcagagaaaaaaggaaagagaaaatgatgtggaagaagcactatttctgaggaatggagctaacaagtaaaacctttttaaaaataactttcagtgcttatactcttctttgtaaaagtttttatttttatttatttattttattttattttattttgagatggagtctggctctgtcacccaggctggaatgcagtggcacaatctcagctcactgcaatctctgcctcctgggctcaagccatcctccctcctcagcctccagagtagctgggactacagggaggcgccaccacacctggagaattttttgtatttttggtagagaaggggttttgccatgttgcccaggctggtctcaaactcctggactcaagcaatccacccacctcagcctcccaaagtgctgggattacaggcatgagccactatgcctggccaataaaagtttgtaaatggcaattttatctgattatagaatggatccctaatcattgtagaaattttggaaaatacaaacaagtacaaagaaggaagatgaaagtatgcagaaccttgacctacgtgtagcagaggccacttctactccgagggttctggtgtatttcacagcaatctttttcctccatgtaacctaagggtggcgggcatgccctgggggcctttgccctggccctttgtccacctccaaggctgcccttagcatgtcattgaatcctcccaaaagatccaagcccacaacccattgacaagcgaggtggagctctacagaactgctgacgggattcacgctgcaggactccatcaacgtccctatgagatggctctgttttcctcatgtctcatctcttctctctctctctctacctcctccacacaccttccgctaaaggagaccatcaggtcctaaatcaagcttgtccaaattaggcccaggatggcttttgaaggcagcccaacacaaatttgtaaacctttttaaaacatgagattttttttgtgtgtgattttttttttaagctcatcagctattgttactataagtgtattttatgtgtggtccaagacaattcttccaatgtggcccagggaagacaaaagattggacacccctgtcctgaattactcagctctgttcttcaacttacaaaccccagttggcaaaaccaaaagcttcatggtcctttgaacatccttccaagaaagaagcttgtcccccgaccccaagctgtccatcagggttaggtgtccattcacgtaactaaaaatcaagtctttttctggaatatggaaggatgggttctgccattaaggcaaacaagaagtcagcatttacggagcatttacatgtaaatgcactttctgtgcataaactcttctagaccgtcacagcagtccaggaagagaaacattgtttttagctctattttacagatgagtacatggaggttaagcaacacacccaaagctctgcactggtaagtggccttccagattcagccctagctcctgctcttgacaatttcaccgtgttgtctcctctccatgtggctccatgagttgcagcgggcatgactggttgtagaccttcccctcccgctttctcccagagctctgatttgtccaggaggcaacctgccctgccttgatggaagccagtcacagaatcccatttgctttggctagacacatacttttccaggctctcttgcaagtggaggtagctatgacatctactctgggccaatgaaatgtaagagaacaactttaagcaaccattaccatagtcacgtatgtgtcatagtgccatataggtgacatatgacatatatgtaacataatgacatatagtgacatatataaggaagccagtggagggtttagttaaatatcatttggctgcttgacttttagctatataagttttaagatcagctagaagtaagtggttaaaagcaagcaaggcaagttaagtttggtgggcttagagaaagcccttaagagaaactccgcttgggcaggcttctgggaaggataattagggccttcggttctcccctgtcctggtcctaagctcctacagccactcacgtgagaatggcgaaaccgaacgctaacctgatgaagcccaccaaacttaacttgccttgcttgcttttaaccacttacttctagctggtcttaaaacttatatagctaaaagtcaagcagccaaatgatatatacctaacccccccaccggcttccttacatatgtcactatatgtcattatggtacatatatgtcatatgtcacatatatgtcgctacgacacatatgtgactacggtaatggttgcttaaagttgtttttcaggactatgggggcagctcctgtccagttcgaacccgttgagatcaatgacccttcaactgaacctgtgcaaatgccggagaagtgaccttttgacgtcagagggcccaaaactccccgagatcatgctaatgctgccattttctaaacatgcaccctatgaagatccaggaagcttggctatgtatgtgcagattgccaatgacctcacttttccttgcctccaatcacctcttcccacactttagaccaccctgctcctttattccataaagatccctaaattccatcttcagggaggcaagtatgagaccttttctcctgcctccttgcttggctgcgttggtgtgaataaattcttttcttttgccaaatccatcataacagcgattggcttactacccatgggcagaaggggacaggttcgctatctagggcagaggggaggaaaggaaacagccagacccttgatagcatcctggggccaccccactgaccctcgggccacctgcatctggactgcttatcaagtcaaaaaaaatttttttttttgagacggagtctagctctgttgcccaggctggagtgcagtggcatgatctcggctcactgcaacctccgcctcacaggttgaagccattctctgcctcagcttcccgagtagctgggattacaggcatccaccaccaagcctggctaatttttgtatttttaggagagatggagtttcaccatcttggccaggctggtcttgaactccttacctcgtgatccacctgcctcagcctccgaaagtgttgggattacaggtgtgagccactgtgtccagcctcaagtaaatattaaatgtccttatgacttaagtagtgtgaacaactgacttggtttgcctggggctgtcccagtttctgcactgcagtttccagatccttggaaacctctcagtcccaggcaaacagagacagctggtcacccaagatttaagacactagtcgtcggacgctgtgttacttgcagctgaagacattttcacagatacatatgtgtggataggtgcatttttaatgtgtattggatcaagacatacagctgtcctgctcattgcaagcatgacatcatgatgattttccaatgccattaaatcatattgttcaaaagacatgtgaatagttcatgcaaagtgctttaaaagcatagctggaagttcgaataagccatgctttagaagcatggctggaactttgaataagccacattagtccaggtctctgtaccattagggctgaacctggaaatcaaactctgctgctgccggctcgttccagagagagatgttatcttcaagaacctgattaatgttcggaaggaaaagaaagccaacccgtgtcattcagcatcttggtctttcacgctgggacgataggggaaagcgggtcatttttatcagcgttgggtgcggagaggtgatcaggccctgctggaataatagagctgctgctttacaaaatgtttgtgaaaacgacatgaaatggaggcatcagcagcttgagttgcagcctaatggaaacccagcagagaccacgacaaaggcagaggtaggttttcagaggcaaggattgacttttaaaaatagtctttattgtctccttttaaaaataagttacagaggctgcaggtatcttaagacaggtgagaaaaagatgtcatgtctgggccgggcgcggtggctcacgcctgtaatcccagcactttgggaggccgaggagggcggatcacgaggtcaagaaatcgagaccagcctggccaacatggtgaaaccctgtctctactaaaaatacaaaaattagctgggcgtggtggcacgtgcttgtagtcctagctactcaggaggctgaggcaggagaatcacttgaacctgggaggtggaggttgcagtgagccgagattgcaccactgcactccagcctggcaacagagcgagactccgtctcaataaataaataaataaataaaaataaataaataagatgaggggtttagatgagccctcgagccccattctgcaagcacagagaggatacaacccgctttagacacagccagatctcaatgcagatctcagtacccccattgactggctatgacctactttgctgctctcagcctcagtgctgtcactgttgaaaagggattacacctttgtcttggggttgtatgagaatcaaacaggcttgtgtgtgtggtgcaggcagcccacggttttgcacaggcagtgtgggtgtgtaggaacagccacttccatccactcctccaccctaggtaaaaagtcagctcacagagactctcctggactatctcagccaacatttctgtgcaaaatgtgtatctcactatcacatgctattttttttttttttgagatggagtttcgctcttgtcgtccaggctgtagtgcaatggcgggatcttggctcactgcaacctcacctcccaggttcaggcgattctcctgcctcagcctcccaagtagctgagataacaggcacttgccaccatgcccagcaaatttttgtattttggtagagaggggatttcactatgttggccaggctggtctcgaactcctgacctcaggtgatccacccgcctcagcttcccaaagtgctgggattacaggcatgagccaccgcgcctggccagcatgtgctattacaatttcctcaaatcaaatggttccaagatgataaacatgtgcattggttcagctttcgtaggattcatgagcttaaacgctatccctgggtaaggataagtgttgataagtgtccagggagcccctggcctcagcaatttctcagcatcttgctggggaccaagggaccggagaggtgcctgccagtgtacataggaagggaatgccctcatgttgcaccctggaaggccaatatgtctgttttctctctgtggccattttaatggactgtggatttacatccacctgtcacactggcctttcctttgattgcagtcagacactcgttcccaaacaaatgtcaccttcttcaagacccttgttcccactctgttcccaaatgtcaacttcctcaagcgcagtttattcttctctcttccaagggctttctagactgccttagttttcatttttcttacaataacaactactaatactgctcttttctgtatgtatgatataaaaaaattatggccaggcacagtggctcatgcctgtaatcccagtactttgaggctgagatgggaggatcgatagagtccaggagttcgagattagcctaggcaacatagcgagactctgtctctacacaataaaaaaattagctatgcctggtggtgtgtacctgtggttccagctaccagagaggctgaggtaggaggatcacttcagcccaggaggttgagctcctgggtgagccatgatcacaccactgtactccaacctgggaggcaaggattgacttttgaaaatagtcaattttcttgacgtgggtttccagctgtctgccttgacagagtgagaccctgtctcaaaacaaacaaacaccagtattgcttagttacctttgttttagacctaaaagaatacttgctcctggccgggcacggtggctcaagtctgtaatcccagcactttgggaggccgaggcgggcggatcacaaggtcaggagatcgagaccatcctggctaacacggtgaaaccctgtctctactgaaaatacaaaaaatcagccgggcgtggtggcgggcacctgtagtcccagctacttgggaggctgaggcaggagaatggcgtgaacctgggaggtggagcttgcagtgcgctgagatcatgccactgcactgcagcatgggcgacagagcgagacaccatctaaaaaaaaaaagaaaaaaaaaagaatacttggtccttttttttttcttttttagaggcagggtcttactatattgcccaggctggacttgaactcctgggcttaagggatcctcctgcttcagcctcccaagtagctgggaacacaggcatataccaccacacccagcttggtctatttaaaaaattatacaaatattacataaatatggtctcactataaaaacatcaaacaatacagaagtataattgctagtacttattgaatgctttcatatgattggtgtcaggctctggattaagcattttacacaaatcatctcagtgaactcttgcagcaactctatgaggtaaggactattattattatctcttagacaggataaagaacttgttcaacgtcacagagtaagtggtaggaacttgaactcgggcagtctgatctgagcccatgctctcgactgggactgtgaaagctccagccagtgactggagttcaaggaagacagagatcaggatagtctgggagaaggctgctcaaatcgagatgcaacttacaggggagggcacaacttggaggggtcaggaaaagattccaggcactcagagagaagggggagctgagacaaatattaggaatgggtgtggtatgccagggtaggtgacaatgaagagtctgcccaattaggacatatcagggacatatgtgtctgcgttgtaaagaaccttaacatgggagccatcttaggttctagagtgagagcatggcatggagatgtgtctatgaaacccagtttggaagacatggtgatcagtatttccacaccaaggagagagtgcactctccctttgaccttctgtctaagacgatccaaggaattcctggaagatgcgtttgctcctcaatctttagctggggttggcaaactatagcccacagtcaaaatctggcccactgcctgttttggtacaactcacgaactaagaatagtttaattttcatttttaaatacttggggaaaatcaaaatcataacattttctgataaatgaaaattatatgaaattcaaagttcagcatctgtgaataacatgctattggaacgaagtcatgtccattcatttcagcattgtctgtggctgtttttcccgacagtggcagaggtgagtaatcacgacagagactgtacactctgtagagcctaaggtgtttagtacttggccctttacagaaatattttgctgaacttacaggagtgtaatcatagctcactgcagccttgacctcctggctagagcaatcctcctgcctcagccttccaagtagttgggactacaggcgcatgccaccacgccttggtaattttaaaaaaacgttttgggccaggcacggtggctcatgcctgtagtcacagcacttcgggaggccgaggcaggtggatcaattcaggtcacgagttcaagaccagcctagccaacatggcgaaactccatctctactaaaaatacaaaaactagccgggcatggtggtgcatgcctgtgatcccagttactcgggaagccgaggcaggagaattgcttgaacctgggagatggaggtttcagtgagctgagatcgtaccactgaactccagcctgggcaacagagtgagactccatctcaaaaaaaatgtctggtagagatgggggtctcactatgttgctcaggctggtctcaaactcctgggctgaagccattctcctgccttggcctcccaaagtactgagataacaggggtgagccactgtgcctggctctaaagaaatttctgcagctagaagagctctcaccttacatgaatgaagaaatcaatgcccagagaggtgaatgctgttcaccaattcactgactcatccagaaaacagttcttgagcgcctactacgtgtcagccctcctgatctattttcactttcaagagacattgagacataggccagctaccaaggccatgtggcgagacagcagggctcttcccaccccactgcttcgactgagaccagagcttgttttcttctctgggctctggcagggaactgggccgtgcccagtgcatgcaaggttggccaacagatttcctgcacctgctcactgatgctacctggcagtttctgggaccgcacttagccctctgcacatccttcactcctttgaaggagacagtaagtgttgtgagttcatttcttcttcttcttcttctttttttttttgagatggagtctcgttctgtcgcccaggccggagtgcagtggtgcaatctcagctcactgcaacctctgcctcccaggttcaagcaatcctcgtgcctcagcctcctgagtagctgggattacaggggcacaccaccataccctgctaatttttgtattttcagtagagacgggtttcaccatgttgacgaggctggtcttgaactcctgacctcaagtgatccacccacctcggcctcccaaagtgctgggattacaggtgtgagccaccgcgtccacttgttatttttgattttttttcccccagactcttaccagtgcctagaatgagacacatagtccttcccttggagggcccagcgagctgtgaagtggatagaagactggcccttggtgtccctaaccctacccctaaggcctttggctaagctggcccagaataattaaagatgtgaacagagattaagctccaggtgggcacagcagctcctgcctgttatcccagaactaagggaggccgaggcaggaggatcgcttgagtgcaggagttcaagagagctgctggttttaaatgtggcacttcctacactcattttctcttgtgctgtctctctcctgccgccacgtaagacgtgcttgctttcccttcgccgtctgccatgactgcaagtttcctgaggcctccccagccatgcagaactgtgagtcaattaaacttctttcctttataaatgacccagtctcgggtagtatctttacagcagtgtcagaacagactggtacacagcccatgtgcatccctgtgtaaagcctggccccaaggagttctcttgaactcctgcactcaagcctttgcccaactcctccctcagctcagaaatctttgtctcaaactaagtgctctgcagcttcactaatcccttctccttctggaatcttcctgatgccctcagctacatcaggtcctcttccttcctgcagccatagcccccttgttatcccattgacatctaggcattccagaaccatctaggcatttgtgtttctgcctcaacagactgcacctcctttaagggactttgcctttttccttcatggttctagcacaccaccccgtccctgatacattgcagtaaatacacaaggaaggaaggaaggctggcaggcatggagggtacacacagtactgcattttgttgaaacaaggcctaaagactgcaggtgcaggtggaaaaatttcaagtctcatgatagacaccacgagggcaatcgcatctatcaaaggcggtgagtcagccctggagaaatccaattaaacatccgtcattcgagtgatactgctttgcattctgctatcaataccgtttctattctgagctggctcagcatctgggctctcttgtgccttccactctcagtcacctgctgcgagttcctgccactgtgtggcgtcctctcccccaaatccaccctctccactcccaagtccatccctcctctcaagctgatgccaacaaaagctgatttgtatccagcccaatctcattgaatcctcatcatctgtagggtggtattcttattctccactttacagaactctcagagaggttaagtaaatcgcccgagatcagacagcttgcaagatttgaaagaagacagtctaactccagagccctgacaattgccactacaacagactgcctacgcatgtcacccagatataccaggctgtcatcttctgttcccatacccccttactttatcccgttctttcagtcaggagccttctaaaatgctttcaggccgggcgcggtggctcatgcctgtaatcccagcactttgggaggctgaggcaggcagatcacttgagctcaggagtttgagatcagcctgggcaatacggtgaaaccccgtctctacttaaaaaaaaaaaaaaaaattagccaggcatggtggtgggcacctgtagtcccagcaacttgcggggctgaggtgggaggatcgcttgaacctgggaggcagaggttgcagtgagctgagattgtgccactgcactctggcctgggtgacagagtgagactttcaccagtggcagttccaaggagtgggctttcttagggatggcagggaatggtttcagtcccacctcgtaatttccattagccttcaaaccacctcaacatttaaaaagtgcttttgggccgggcgcggtggctcacacctgtaatcccagcacttcgggaggccgaggcggggtggatcacgaggtcaggagatagagaccatcctggctaacacagtgaaaccctgtctctactaaaaaacacaaaaaatggtggtaggtgcttgtagtcccagctactcgggaagctgaggcaggagcatggcgtgaacccgggaggtggagcttgcagtgagccgagatggcaccactgcactccagcctgggcgacagagcaagactgcatctcaaaaaaaaaaacgtgcttttgaaatgggaaatatcaggtaggatagaagcaataagagaaaatgaaataaagaaatgggaaatagacatttttcccaattttgtggaaagtgtaagaaaaaaacttgatagaaactatgcaattttaattaatttgtacgacacaaatctcactaaaaaccatggactccctactgcgaaggcagctctaaggtaagtcccctgattgtttcatgtgaccaactggctggccctaagcccctcctgtttaggaatttttttttttttttttagacaatgtctcactctgtcgccaggatggagtgcagtggcgtgatctcagctcactgcaacctccgcctcctgggttcaaggaattctcctgcctcagcctcctgagtagctgggactacaggcgcccgccaccacgcccagctaatatttgtatttttagtagagacagggtttcaccacgttggccaggatggactccatctcttgacctagtgatccgcctgcctctgcctcccaaagtgctgggattacaggcgtgagccaccgcacccggccctgtttaagaattttaaagcaatcactccattttttttttttttttttttgagatagaatcttgcttgctctgttgcccaggctggaatgcagtggtgtgatcttgatctgggcttactgcaacctccacctcctgggttcaagcaattcctctggctcagcctcccaagtagctgggattacaggcaccagccaccatgctcagctaatttttgtatttttagtagagttggggttttaccagtttggccaggctggtctcaaactcctgacctcaggtgatctgcccacctcggcctccctaagtgctgggattacaggcatgaaccaccacatccggccgcagtcattcctttcagctgagcttctaaggactgaaggaaaaaactcttaagaacacaatctgcaggccccggggaagcctcccctgccctcttcccacccattcctgcttagcccatggactgggccactaggaccactgtctcagcttagccctgctcctgccaaagcacagagcacacttctctgaagccatcacctatctaccatcaccactggcaattcccatcagagtcattgcaccagcagaagcagataagcttttgataataagtaaattaatgtttaagtcaacttcatgtttattcagcatgctagtgattagtggtctcctttgtaggcaagcgagaccctggggcttgataaaccacaaagaaaacgcaagtaatctctgttggatgccccaaagtagggcaggctaggactagaatgagtgatgtgctggggaatgtttaactggctggaagcaggggagggaggtagaagccttgctgtgaatcatttgccaatttccacggtgtaaatactcccactgctgcagattttgagctacccacagttgaacaactggttctccagattcctaaaaatttaacatcactggctagaatcaacaagtgggcagatttaggggtgcttcttcaacactctaaagtattcattcaacgtttacttagaagagaagctgagtattatttggggaaaaggttacctgtggcgatgatgatgacaatgattttggctaccatttactcggaattcaccacgcacagggcgggtgcagtggcttacacctgtaatcccagcactttgaaaggccaagaccagcagatcacttgagatcaggggttcaagaccagcctggccaacctggtgaaatcccgtctctactaaaaatacaaaaattagccaggcatggtggtgcacagctgtaatcccagctactcgggaggctgaggcaggagaatcacttgaacttgggaggcagaagttgcagtgaaccaagatcatgccactgcgctccagcccgggcgacaaacagaatttaccatgcaccttttacaccctaagtgctttatacactaagaagtgcttcataggcactaaatgctttacacagatcatctcaatcctgataaccactgtttgaggtgggcactacgtggttgtctcttttatacaggaagatcccacagctcagagaggttaagtggctccatcggaatcacacagctagtcaatggtggagctgggacactgacctgtggatcctgattcggacacccacattatctcaatgaagaacatctccttcattgtgtggcaggtcaggtctcactaacgcaggcctccatgacagctatttcagcagggactgtgtggttaagttaaacattaaaagctgaaagtggctgggcaggcagtgactcatgcctgtaatcccagcactttgggagcccaaggcggatgcatcaccttgttcaggagttcaagaccagcctggccaacatggtgaaaccccgtctcacctaaaaatacaaaaaaaattagctgggcgtggtggcaggcacctgtaatcctagctactttgggaggctgcagcaggagaatcgcttgaacctgggaggcggaggttgcagtgagccgagatcctgccattgcactccagcctgggcgacaagagcaaaactctgtcactaaaaaaaaaaaaaagaagaagaaaaaaacaaagctgaaggagcctactgggcatggtggctcatgcctgtacaatcccagcactttagaaggcagaggcgggtgaatcacctgatgtcaggagtttaagaccagcctggccaacatagtgaaatcatgtctctacaaaaaatacaaaaattagctgggcatggtggcgcatgcctgtaatcccagctactcggaagctgaggcaggagaatcgcttgaacctaggaggcagaggttgtagtgagcagagatcgcaccactgcactccagcctgggcgacagagcgagactctgtctcaaaaaaaaaaaaaaaaagctaaaagagccagtgcccttatacaaaggctggaatgtaacagaaatcctccaacagttttgctcaggcctttcctgggccttgaaacatgacgagataacgaggcaattcttaacaggacacgtttaggattaaacaagttttattgggggtgtgaagaaactccccaggcctccacaaacaagtttattgggagtgtgaaggaagtccccaaacctccatgatttagcaggagacaagataagggtaatcaccccagcaactggacccatttagattaagtaaatttactgaggcttcagaggaaggtcttcaggactcagaccttagttagactagaagaagctgattatttaggtctttaggtgaacgcacacttacacgtggacatatagtttagaaggtatgtaagctctgggaaactttgtaattttgagttggtctggtggtattttccaggctttttccctgtaactggtaacagaaatagaaactccctcctttcccagtttatttgcatctcgttattgggtcactagaataagcagcccaaccctcagtttgatccaggaacaattgttccaagcaatttaattctgataccagttcagcataatgctcttggaaaaaaatcaaaatcctgcagatagcaggactcactttgcttagaacgacggggtttatgtgtatgtgtttttgtttgttgtttgtttgtttgtgacagggaaacagggtcttgctctgtcatgtaggctggagtgcagttgcttgatcatggctcaccacagcctcaatctcccaggctcaagacatcctcctgcctcagcctcctgagtggctggaaatacaggcgtgccctagcatgcttggctaatttttatattttttatagagagggggttccaccatgttgcccagtctggtctcaaacttctggcctcaaagcaatcctcccatctcggcttcccaaattgttgggattacaggcgtgagccctgtgcctggcccccaccctcttctttgacctctgtcaaagaagaccttctttggccaccattcctggccatggaaggctgtttacagactacctattgttacttacacatggtcttgggtggggttgtgtctccctcctgtaatggaaaaaagttggaatttttggctgctcaacctccaaaccctagttttagggaaagcattcactgtgtcagtcattattagagaagttcaacaagggagcacccccacttcctcagactcagccaatcagaagctcatgtccaagactttgaccacagagcaaatgacagagataaaaggatggagggattagacttgtgctgtccagcaatggcggcttcctggccagattggtcctgtggccagtctctggggctttcttgatccatactcatttccaagcctgtccttccgactcctgagcccccatccccactcatagccttctacaatcccattttttggttgagtcaggcagagttgatttctgttgcttgtggccaacaaccctaaccaaaagaagcgtcagagtgttcccaccaaccacaccgggtcttctctctaagggaagtctggatggggacaattttctccatcatatatcactttagtgagtctgtactgtcttctatcgattggtactgggctagcttgcacctaatcagctgtgggcagatatcagtaagagggtgttagaaagcacttattagaaaatttggggccaggtgtggtggctcacacctgtaatcctagcactttgggaggccgaggcaggtggatcacttgaggtcaggagttcgagaccagcctggccaacatggtgaaaccccgtctctactaaaaatacaaaagttagtcaggcgtggtggcgggtgcctataatcccagctactcgggaggctgaggcgggagaattgcttgaacccggggggcagaggttgcagtgagccgagattgcaccactgcactccagcctgggtgatagagcgagactccgtctcaaaaaaaaagaaaaagaaaagaaaagaaaatttgggcttgtgttaggtgctttgggggacagtttaaaggaagtgagcatttactctggattggatgttgtcaggaagtggaggtaattctctgatagagtgtcttcctaattctttcctttaaagggagaagaacagagtaagactgaaactgtgattgatggagaactagcagtcactcatatgagctaggaaatggggctattgggtgatttttgtggctgggacaatgttcatgtctttatctgccttcaggagtagtgttattttgtcttgatctatcacggtctcaggatggccttgtctgatgccggcaatctgcaaaattgtttacattcaacaggagaacactttggccaagctgtgagtgtcaagccagctcccggctgccaggggcagcttttctctttctcacagtgtaggaagtaatttatatacttcttttctgcccataagtaattactaaatctgcaactatagggaccagtcctacccattttagtcttccctgcggggcccaccatgatgctttgcatactgaacgtgctctgggaatgtgcccagtgaactaaattatgggcacagagaactctctgggacttggcattattaagatcatgctgaagtatattttcaaaatttaaaatgtgactcatacaaatgtggaatgaacacttgtcaaaaaatttatttaacccattaatgagggaaccagtaaaatggtaaagctcgctccaagggcatttaaaaagtggactcatcagcatctttaatgaaaaccttagcataagattgctaaattcgagagaaatctggttaacatgctataagggcaataaaaccataacctttaatgtcgtcttttttctactggacagaaatctacaagttaacgtgtaatttcactatgtcagtgctctaatcaaataataaataacaaagtcagatacatgtactctctccaagataattaatcatccgtgggcaggtcattaagcagtgcctcagtatgacatggaaaagacattcttccttatttccaatttttagttaattttcatttaagaatcataacaaaagactcttttgtggcttcttaggaacatattcaactgaaatttttgttttaattgtgttttagagacagggtcttgctctgtggtccaggctggcatgcagtggtataatcatagctcactgcagccttgacctctcaggtttaagcaatcttcccacctcagcctcctgagtagctgggattatgggtacacactaccatgcccagctcatttcaaaattttttgtagagaggagttcttgtgatgttgcccaggctggtctcaaacccctaggctcaaggagtcctcctgcttcgacctcccaaagtgctgggattataggattgagccactgtgcccagcctgaaatttttctaatgcccacctcacacctggcaattccccaggtatcagcagcagcagtagcatcctgctgatacggacaggcggcagaaggacagggtcccaggtgagggctccaccctcaagcctggacctgcagccctaaatgagaacaggcattcctgttttcacacccaaatgttgccttttccaaaaccgctctggaccaccctgcccccatcctatgcccttaagaaccccaaaccccaggctccacaatcagaatagcaccagagtggcgtggcagagaaggagagaagagaagaagtgtctgaacatcgagaggagtttggctggggacagtcagagaggagatcatctgaggatggctgaactccaggggaagattaccttcccactccatcccctttccagctccccttccactgagagccacttccactacttaataaaaaatttgtattcaccatccttcaagtccatgtgacctgattcttcctggacaccagacaagaacccaggtaccaagagggcagggtgtaaaaggctatcaccctgaatctccactgaactggttaacacttagtcatctgcgtacagcaactgctaaaagagtattaattgtaacacatccctagacgctgccatgggaccagagcccaaaagcactcaccccagccccaatctgctcacctgcatgctccccctcctgcaaggggtttgatgcagtggcagccaagtaagcgagccacacccctgtcacaagtcctgcaaaggggacaggggagctcccccatttcactgctaacatttactgaacagttattatgtggttaggtattgtaatatcttttttatgtatcttatctcatctgctcctgaccaaaaaaaaaaaaaaaaaaaaaaaatccctaggaggtaattcattaagccactagtgtggttaataaaatatctatttggtcttcatccctggttcccagcacagagctcctaaagcccctggagtttcctgagcgataggactgtcttttgttatccatagcaatccccattgtactacatctgagtgtatgctaatgagggcactcaggctgagttccctagagagatggcttcaggttggggcctcgtcaccagaagagcaaatgtgtgataaagacaggggagaggggtgggcagggcacggtggctcacgcctgtaatcacagcactttgggaggtccaggccggcagatcacgaggtcaggagttcgagaccagcctggccaatatggtgaaacccccgtctctactaaaaatacaaaaattagctgggtgtgatggcacgtgcctgtagtccaagctacttgggaggctgaggcaggataattgcttgaacctgggaggcggaggttgcagtgagccgcaatcatgccactgcactccagcctaggctatagagtgagactccgtctcaaaaaaaaaaaaaaaaagacaggtggtcgggggcactgccggatgcagaggctcatgcctgtaatcccagctactcaggtggctgagccaggaggatcacttgagctcaggagtttgagaccagcctgcacaacatagcaagactccatctctaccaaaaaaaaaaaaaaaaaaaatttaggccgggtatggtggctcaagcctgtaatcccagcactttgggaggccgaggcgggcggatcatgaggtcaggagatcgagaccatcctggctaacatggtgaaaccccacctctaccaaaaatacaaaaaaattagccaggcatggtggcaggcgcctgtaggcccagctactcgggaggctgaggcaggagaatggcatgaacctgggaggcggagcttgcagtgagccaagatcgcgccactgcactccagcctgggtgacagagcaagactctgtctcaaaaaaaaaaaaaaaaaaaattaaaaattagccaggcatgttggcacccacctgtgtagtctcagctacttgtgaggctgaagcaggaggctcactcctaggaggtcaaggctgtagtgagctatgatctcaccactgcactccagcctgggtgacagagtgagaccctgtctcaaaaaaaaaaaaaaaaaaaaaacaattcggcgggcaacttccagtcccactcgctgacctgccaggaagaggaggaggctggcgactgaattataaaagctcttgaacagtgagatccagggagcctctaggttggtggacacactggtgtgctgggagggcagtgcacccagagagggcatcatggaagctctgcacggctccctctccacaccttgcccaatgcatctctcttccatttggctattcctgagttctgtcctttgtaataaaccagtaaacataagtgaagggctttcctgagctctgtgagtcattccagcaaactatcaaacccgaggaggtggtcgtgggaacccccaagtttgtaattggccaggcagaagggtgggtggctccggacttgcgactggcatctgagataggggcagtctggtgggatggggtcttttaacttgcaggacctgatgctaactccaggacatagtgtgatagctgaattgaattgcttgggcacccagttggcatccaagaatcagagacttagtgtagaaaaatggcacgtatttggtatcagaaaaaacacatttggtgtcagaagtggcgtcagaaaacaccacacagagtaacagagaagtcgagcaatttgctcaagaccacacagccggtaagcatctccgctgggacacagaccctggcgcaggcaaagtctgtgactgtaactgctacgtgtgctgcctcttgctgcgcctgacctcctcacaccagccaccaggtgcaacatccttatcgccttgcaggcaagaaggaaaagtgtggctcagggtagcaaagccagtgtttcctgaacatcagtcacttgcacgttaccatggcaacagttgctatgcctcaagccctctctattattattattatttgagacagggtctcactctgtcacccaggctggagtgcagtggcacaatctcagctcactgcaacctccacctctcaggttcaagtgattctcatgcttcagcctcctgagtagcttggattataggtgcatgccaccgagagccgctaatttttgtatttttagtagagacggggttttgccatgttagacaggctggtcttgaactcctggcctcaagtgatctccccacctcagcctcccaaagtgctgggattacaggcgtgttctcttttattgtctatttaatacttttctttatgttgattctcttttttacatcaccataaatgcaaacctaatattgttcctaaaagacatgaaaattatatatatttttttcagcagggtctcactctgtcgtccaagttggagtgcagtggcgtgatatcagctcactgcagcctgggttccagcaatcctcccgcctcagcctcctgggtagctgggggtactacaggtgcactccagcacactgggctaattttttgtaaagacggagtttcgtcatgttgcccaggctggactcaaactcctaggctcaagtgatcctccactttggccttccaaaatgctaggattacaagcatgagccactaggccttgcctgaaaataaattctttttctttttctttttttttttttgagacggaatcttgctctgtcaccaggctggagtgcagtggtacgatctcggctcactgcaacctccacctcccgggttcaagagattctcctgcctcagccttccaagtagctgggactacaggtgtgcaccaccacgcccagctaatttttgtatttttagtaaaggctgggtttccaccatgttggctaggctggtcttgatctcttgacctcatgatcctcccacctaggcctcccaaagtgctgagattataggcatgagctaccatgcctggccgaaaaaaaattcttaattaatgttttcctaaatgctgcctaaaatcatcccagagcgtacccaactttgggaaaaactggaccaactaagtctgataaagcaggggttcccaacccctgagccaccaccagtacaggtccttggcctgttaggagccaggccgcacagcaggaggtgagtggcgggtgagtgagtgaagcttcatctgcatttacggccactccccatgctcacagtaccggctgagctccccctcctgtcagatcagcggctgcattagattctcataggagtgcaaaccctattgtgaactgtgcatgtgagggatctaggttgcacgctccttataggaatctaatgcctgatgatctgccactctctcccatcgcccacagatgggaccatcttgttgcaggaaaacaagctcagggctcccactgattccacattatggtgagttgtataattatttcattatagattacaaagtaataatgatagaaataaagtgcacagtaaatgtaatgcacttgaatcatctcaaaaccatgcccccaccccatccctggtccatggaaaaattgtcttccatgaaaccagtccttggtgccaaagaggttggggatcgctgctataaagtcaaacagccaagatatcaacccaggctcctgcctccaagtctagggctgttttagctacaacatgggccccttcaccacattgtgtttctggttaactgtgtcgggcagcaagtggagaggaactggaaatttctcaacttggctctaaatgagaccaaagagaaaaaccaaatagtgatggcagacaacagatggtgagagggctcactcctccaggcggttaatgatgccctgggcaagctttccgaatttaatcaccagagcgattctggactatgcttcagtccagaatactctgattgttctaggatccgctggaattttcctctggaataactcaaggtcagttctaacaggtctaagcagcagcatgagcattgaagacatggaacagtagcaaacagtcaccatcttcaagggggaatgagagcactgacttccaatctaagagccttttttttttttctttgagacagagtcttgctctgtcacccaggctggagtgcactggcacatctcggctcactgcaatctccgcctctcaggttcaagtgatcctggtgcctcagcctcccaagtagctgggattacaggtgcacaccaccatgcccagttaatttttgtatttttagtaagagatggtgtttcaccatgttggccaggctggtttggaactcctgacctaagtgatccacccaccttgggctcccaaagggctgggattccaggcatgagccaacgcatccggcccatctaagggctttttaatgacctggtatagctcaccaaactccacgtggggaagcctcctatcgactcaagatgtcagtttattcaggcatttcccaaagtgttgctttcaaaggtaaattaaacttcattatctaaatgagcagttttcgtcttgggtcaaactatagctccaaaatgctttcataggtggcagacatttaagaattttcagccacgcacggtggctcatgcctgtaatcccatcattttgggagactgaggcaggagaatcacttgaggccaggagtttgataacagcctgggcaacacagcaagaccccatctctacaaaaaaattaaaaaattggccaggcatggtggcatgtgcctatagtccccactactcaaggggctgaggcaggaagatcactggagcccaggagttcaaggctgcagtaagccatgattcatcactgcactccagcctgggcaacagagtgaaagcccgtctcttaaaaatacatatatatttctcggccgggcatggtggctcatgcctgtaatcccagcactttgggaggccgaggtgggtggatcatttgaggacaggagttcgagaccagcctggccaacatggtgaaaccccgcctctactaaaaatacaaaaattagccaggcatggtggcgggcacctgtaatccccgctactggggaggctgaggcaggagaatcgcttgaacttgggagacaaggttgcagtgagccaagattgtgccactgcactccagcctgggcaacagagcgagatgctgtctcaaaaaaaaaaaaaattaagaataagaaaaatctatcttctgctctgctcttggccagctcacttgatttctttaaaaaaataaaaataaaaggagaccctgtgttggtttttagaagtccaaaacaggaacaaatggaaagcaatagtcattgaatgatgacaaattctgtttggttggacactgtcagaaagcctgtgcttataattttcttgataaatatagccccaggttcaatcaaaggcataatcaacggacttcaataacggatgtgatgatgaagacaacagatggcatcggaattatctgacgccacgggagaccacaaacacacatttcattatgattctgatcacgatcctaggctacaggggagagagagaggctcccactgctgtgccaaggagtcaaactaacatagggcagattttgtactttttattaacatctgaagcaagttttcgtcaagaaaggattaagaagatgagtcatctataagcagctgatggacactagggttcttctatttcagccagcgaagaggtgaggggatgtctgtgccgtgggaggtgagggggcatcagcctacctgcttctaagactctcaatgaccaggctatgccttggaacaactagacaagactctggctgtaagaccaggccccagcattttctttaaagttctccatgtgattgcaataggcagtcaaggctgagacgcggaagcatggggggatgttggcctggtgcaagatggacacattgcctccaacttctggctacttctgtaaaggctgttgagggatattagtcagtgctcaatcggggaagcagggtcactacgtgctctggggcaagggatgcgttataggaattagaccttctacaattgtccagggagctggggagatggcggtctgggaagggtggagaggatgagagaagtcaccgacagctgatatgagagtcagatgcgtccagctgttaagatggagtggcagaggggaaacaggtagaggggtccctagggggctgctgcctcgtctgccaagcatccagaggcgggggggctgctgttggtcagcaggcccagcggtcaggaagacaagctgcaagggacacaggggagggtgaggacaagctggaacctctgtggcccctctgtcagatcacctccttgtctcatctggacagccttcaaagagtaaacactgatgtcaccttccttccacttcccaaatctcccgcaccatcctcttctgcctacttttaacccacaaccctacagggaaaaggatatggtttggctctgtgtccccaccaaaatctcactgcaaattgtaatccccacgtgtcgagggagggaagtgattggatcatggcggcagtttcctccatgctgttctcgtgataaagggtgagttctcatgagatctgagggctttataagtgtctggcatttcccctgctggctcttattccctcctgctgccttgtgaagaaggtgcctgcttccccttctgccatgattgtaagtttcctgaggcctccccagccatgcgaaactgtgagtcaattaaacctctctattttataaattactcaatctttggtattttttttttccagtgtgaaaatggactaatacaaaatgggatatgggaaataaagttctcggtatagctaagctttcttttttcttttctttcctttttttttttttttgagatggagtcttgctctgtcgccaggctggagtactgtggcacgatctcagctcactgcaacctccgccttctgggttcaagtgattctcctgcctcagcctcctgagcagctgggtctacagggacacaccactgtagtcacctaatttttttttgtatttttagtagagatggggtttcaccatgttggccaggatggtctccatctcttgacctcatgatccacccaccttggcctctcaaagtgctgggattacaggcgtgagccaccgcacctggccctctttcttctttttgagacagagtctcactctgttgcccagactggagtgcagtggcacaagcatagctcactccagccttagactcctgggctcaagcaatcctcccacctcagcctctagaatagctgaagctacaggcatgcaccactatgcccagctaattatttagtttttttgtagagatggggtcttgctatgttgcccaagctggtcttgaacttctaggctcaagcgatcctcccacctaagcctctcaaagtgcagggattacaggtgtgagccactgcattcagcctaaatttttaatagaatattgcagcacagactagaaggaacagaaatccactcaagctcacttgagaaaaatatagtttagtaaaggtgtaagaaaatgaagggaaatgctagcatcttgacagatggtacccatatgtatcttggggagataatggtttttgcttggaattatggcttgacaaacacctggggtggtacttgcaagagctcagcataaattggtgccgtggcttcttagaagagggcaaagctgctgtggataagacaggagaagtaagtgtcttccttggaatggagggagctgagataaaggagaagagaaaaagaggtgatgaaactggaccccgtgtgtggaaaaggccaagaaaaaggaaaccaccccactgccttatggcacagggtggtgaaaaagatcttgttaaccaggaatgtcaaatgtggatttctagttctcctagttatggccatatggataccacgatgccctttactggaacattgactttttttttaagacagagtctcactctcttgcccaggctggagtgtagtggcacaatctcggctcactgcaacgtcttcctcccgggttcaagggattctccagcctcagcctccctaatagctgggattacaggcatgtacctccacacccagctaatttctgtatttcttagtagagacagggtttcgccttggcctcccaaagtgctaggattacagacgtgagccaccgcgcctggccttttctttttttttttttttttttttttttttttgcaattaaaaaaaaaatcaaggtctttgcagggctgtggctggggctagtcctctggggctggagggacagttacatggtgagccaggagacgattgtcactggtcatggtttttaagctgtctgctgtgaagagatcaatgacaccctttttgtgatcctcattgtattgctcctcaaatgacctgtgggagtaggatagggcattgttttattctgttgttatggaaaccagtgaagcatctgagtttcatattcagttggatggaggtacaggactcaaggaaccaagcctaggagcagagaagacttgaggatggaagcccctggaaatgtacagacattgtacagctggattttggatttccctaggcggtggcaacacggggtgggaggtatttctccaagggtctggagaaaggatgcgcagggttgaacaaggtgcaacatcttatggactacccagttcatctggactgcaatgggaatgtcatggctgagttccttctctgctttcaaaggacactgtctctcttgttattcttgaggcagacgctctgtcctctttcccttcaaagactggctttctctgcttatgcatagacttcggtttgccactccctcatcatccacctgggctaatctctctgcatcccaggagaaagactctgattggcccagactgagcaaatttggaccaatcagagaggagtgaggagaggctcaagcccccctacacctgaggctgctacttggtcccagctactcagaaggctgacgcaggaggattgtttgaacctgggaggcagaggttgcagtgaaccaagattgaaccactgcactccagcctgggcaacacaatagactctatctcaggaaaaaaaaaaaaaaagaaagaaacgaacttcctcttccacgtaatatccttcagatattttgagacaaatcttaggtgccccttgagacttctctcgtcgtttcaacaaccttgacatggaaaagatcatcattccaccctctaatctcccccttctcttgtgtctcctcttccaaacaaagaaaccagtgtctacacttatgcctgtatctatccatttccaaactcaatttcttcctggtggtaaaggaaagtaacatttaatgagcacttacgtggtagcaggcactggactgagcacttaatatgcttgatctcttttactcctcatgaccaccctgcgagatactggatgcatggctatttaacagatgaggccaccgaggctcagagaaggtaagatatttgtgcaagattgcacagcctataaatggcagaggtagaatgtaaatctaggtgtaatttaatccggagcaagtaaacacacttaccaggcacgaggtctatttatcagaaagcaaccccatccaagaccaggatatctagtaatgaaaaaacagggatctggccaggcgcggtggctcacgcctgtaatcccaacactttgggaggccgaggcgggcagatcacgaggtcaggagattgagaccatcctggctaacacagtgaaaccctgtctctactgaaaatacaaaaaattagccgggcatggtggcaggtgcctatagtcccagctacttgggaggctgaggcaggcgaatggcgtgaacctgggaggcagagcttgcagtgagccgagatcgtgccactgcactccagcctgggcgacagagcgagactccgtctcaaaaaaaaaaaaaaaaaaagaaaaagaaaaaaaaaaggccgggcatagtggctcaagcctgtaatcccagcactttgggaggccgaggcaggcgaatcacgaggtcaggagttcaagaccagcccggccaatatggtgaaacccggtctctactaaaaatacaaattagctgggagcagtggcgggtgcctgtaatcccagctactagggaggctgaggcaggagaatcgcttgaacccaggaggcagaggttgcagtgagccaagatcaagccactgcattccagcccaggtgacagagtgagactttgtctcaaaaaaaaacaaaaaaaacaaaaaaacaaaacagggatcctaccacgtttggcagaacccaaccaggaatgtcttggattgatctaatataacttgagatccccgaggagtttaggggactgaggacagacacagtagactggaattccaggagacaacaagatctaagtaactgatggctcaatgaatagcagccaattacataacatgaaatatgtaagtcaggatattgccttaagggggtgctcgggaatctggttgtgtagacccaaaacaccaaggcagctctgctaagtcacttgcagttttattccctcccatttctctttgggcatcctgtcctagaactgtcaagaaagggttggtattttatttgaaggaaaatgtgggaaggaggctcagccaagcattatcctattcaattcagaccatcacgtgatagggacaagcccttctcaatctctgctgccactcacatcagcagctttccagaaataagcaaagggaatggaaaaacccttaatcgccaggccacggtacatgcaatttactggtatctattgccctgtctttctaagaagcttcttttttgggagatttcaaaaaaatgatgagaacccggcacaggatgaagctatgagggtgccccatgtagtgtgtcatcttcccctttccccagcctcaccagggccgtctctgtcattgttgctgccacactgtggctcctgctctgggcttggcccttatatgaattgctgtggtcactcaatatggtagactgaagaatggtccctgaagatatccatgtcctaatgaacctatgaatctgttaccttacacggcaaaagggattttgggccaggcatggtggctcatgcttctaatcctaggactttaggaggcctaggcgggaggatcacttgaacctaggagttcaagaccagcctgggcaaggtgatgagatcccaactgtattagtccattctcatgctgctatgaagaaatacccgagaaggagtaacttgtaaagaaaagaggtttaaggctgggcgtgatggctcacacctgtaatcccaacactttgggaggctgaggtgggcggatcacgaggtcaggagtttgagaccagcctggccaacacagtgaaaccccgtctctactaaaaatacaaaaaaaaattagctgggcatggcagcgggtgcctgtaatcccagttacttgggaggctgaggcgaataattgcttgaacccgggaggtggtggttgtagtgagccaagattgagccactgcaatccagcccagtgacagtgcgagactccgtctcaaaaaaaaaaaaaaaaaaaaagaaagaagaaaagaggtttaattgactcacagttccacatagcttggaaggcctcaggaaacttacaatcatggcagaaggttcctcttcaccaggcggcaggagagagaatgaatgccagcaggggaaatgccagatgcttataaaaccatcagatctcatgagaactcactatcatgataacagcatggcgcaaccacccacatgattgaattaccttccaccgggtccctctcatgacatatggggattatgggattacaattcaggataagatttgggtggggacacagccgaactatgtcaccatctctacaaaattcaaaaattagctatgtgtggtggcacgtgcctgtggtcccagcttcttgggaggctgaggcagtaagattgtttgagcccaggaattaaaggaagcaatgagctatgaccgtgtcactgcactccagcctggacaacagagcaagacttcgtctctgaaaaatatatatttttaaaaaggaaatttgcagatgtgattaaattaaggggtcctgagatggggagatcatcctgggttatccaggtgggccctcaatgtcatcacaagtgcccctacccatttatgcctgaggttgcaattttttgaatttgagaaatcagacctggtgatagccttgagaagtagcatataaataactcccacatgcttagtgttccaataatggaatgctaggcatacatttaagagaaaaacagagggatttgacacagaagagcaaaggcgacaggatgacctcaatcgagagggactggactatgccatgctgctggcttcggagatggaggagggaaacacaagccaagaaatgcaaagagtacggttctagaagctggaatgaatgaggaagaggcttctcctctagagcctccagaaagcacggctctgccaacacctgatttcagctcagtgaaatcgatttcagacttccagcctccagaactgtaagataaaagaaatgtgtgttgttttaacacatttgcagctgtttgttacagtagccacaggaaaataacgcacttagctgcattatcactctgttccttcctatgaatggacccactgttcaccctaaccatcagagagccaggcagttctcaccacccagacctgccacatggaagggaacccttgagattatgtgaccgtgggagaagcaggaagatgagccctcattaattcattcaatcaatcttcactcagagtgcctacgctgagtttggctgtgtgctgggtaccgtcaacatttttgggagtgaaaatagctcagcctctgtcctcatggaggtcagcatctaggaggagagtcagatattgaacatacactcacaccaatgaacacaaatttacaaaaggcttctaaggaaaggattgcagggatggtaatgggacagggactggggaagtgctgggaaggtgtccctccagaaatgccctagatctcagtcctcgaggggacagagtttatcaggtgccttagtccatttgggctgccattctccctttcttagcctaggtggcttataaacaacaaacaccgccgggcgcggtgctcacgcctgtaatcccagcacgttgggaggccgaggcaggcggatcacgaggtcaggagatcaagaccatcctggctaacacggtgaaaccctgtctctaccaataaatacaaaaaagttagccgggcgtggtggtgggcgcctgtagtcccagctactcgggaggctgaggcaggagaatggcgtgaacctgggaggcagagcttgcagtgagccaagatcgcaccactgcactccagcctgggcgacagagctagactccgtcaaacaaacaaacaaacaaacaaacaaacacttatttttcatggtaaaagaggctggaaagtccaagatcaaggtgtcagcagattcagtgtctggtgaggacctcttcctcatagatagtgagttctcactgtgtcctcacacagtgaaagggagaaacaagctaccctgggcctcttttacatgggcacgaatcccatccatgaggatctgccctcatgacctaatcacctcctgaaagccccacctcttgatattattacattgggaattagatgtcgacatatgtatttaggggtgatacaaacattcagatcatagcaccagggaaggagaggggggtgggaggagagggatccaggcagagggaacatcacaaacaaaaaggcccccacggcaggaggggacctggtgtgtgtatcggggggtggggaggtggagactaaaaggaggcccaagggagtggtgtgtgtgtgtaagggagggagctgggggtgaggaatggatgaagaaaagaagttggagaagaggtgtgagcagatccagcaagatctcatgggctttatcatgctaacaaattctggaaggtgtttgctatggtgtaaatgtttatgactcttcaaaattcatgttgaaacttaatttccaatgcaatagtattaaggggtgagggccattaggaggtgggatcagtgcactaacaaaagtgctcgagagagcaagttcagtcctttttgcccttctgtccattctgcttgtgagaagacggtgcccttcctctctggagatcacagaagcaaggcgccatcttggaagcagagaatgagcccttctaagtatggaatctgctggcatcttcatcttggacttcccagccagactccagaactgtgagaattaaatttctatttataaattacccagtctaaggaattttgttacagcaacaggaacggactaagacagtgtttaaatctgagagttataatcagattcacatggtgagaaaatccctctggctgcaggacagagatgggcatgtgaacctgggtggtggccatggagatggagaaagatggacagctgagcattattttaggaggtaaaacaaacaccagttgatgatgaactgaatatatgaggtggagggttgggaggggtcaagaatgatgtctaattttggaatttgagatttccatggatagatggtgatgcttgaccatttgctgagctagggctggtgggtattgggactagatggggggatcatgagtttgacttggacagattgagttacaggtatctttgagacatttaagtggagatatcagatactgtaccttcccctgcctgtctttctcagcattttccccttagaaatgtgtgtccaaaaagaaaaataccgtgtgattccacttcttttttttttattttattttttgagacggattctcactctgtagcctgagctagagtgcagtggcacaacctcagctcactgcaacctctgcctccaggtatcaagtgattttcatccctcagcctcctgagtagctgggactacaggtgtgcgccaccacgcctggctaatttttggtattttagtagagacagagtttcaccatgttgcccagggtggtctcgaactcctgagctcaggcgatccacccaccttggcctcccaaagtgctgggattacaggcgtgagccacagcgcctggcctgattcctgttttatgaagtatgtagagtcatcaaaatcagagacagaaagcagaatgctggttaccaggagccaggggaaagggaaaatggggagtgagtgttgaatggtacagagtttcagtttgggaagatgaaaaaaattctggggagggatggtgatggttacacacagtatgaatgttcttaatgacatagaactgtactcttagaaatggtttcagatagtaaatattatatatattttgccacaatttaaaaaatagaagtgtgtgtgcaaactacatataagtgtgcataaaatgttttatttttatagtaaaatttatataaaatatactataataataataaaatataataaaatatgatttattatattttattattatttactattatttcatacttcatagaattattattatattatttttatggaataataaagcagttattttcccaacatcctacttaagtaaaaatctgtgtgtgacttttagacggccccgtgtgccccattccctcatatttttctcattccctcagaggtaggcactatcacaaacttgtggtaatgctttttatttttatcatttaccacccatatatgaagcccggaacaattatattttttagtttttttttttttttttttttgagatgcagtctcgctctgttgcccaggctggagtgcagtggcgggatctcagctcactgcaacctccacctcctgggttcaagcgattctcctgcctcagcctcccgactagctgggactacaggcatacaccaccacacccagctaatttttgtatttttagtagaaacggggtttcgccgtgttagccaggatggtctcaatctcctgaacttgtgatccacccacctcagcctcccaaagtgctgggattagaggcgtgagcaccacgcccggcctatattttttacttttatacactttatataaacctgttgctcaacatcttgtttttgagatgctttcatgttcatacctgttgctcattcatttttcactgctgtatagtattctgtggtacagctagaccacaaacgaggcagttatgaacattctggaacatgcctcctgatgctcatgtgtagtttctctagggcagtgctggtgaatagaatgttctacaacaatagaaatgtcctatacaaatgtatgctttccaatagggtagccactagccattatttactaatgagtgcttgaaatatggctcaggctaccgagagactgaattttacatgctatttaattttaattaatttaaactgaaatagccacatgaagctactggctaaccaggggtagacccaggagcaaaactgcaggttataatcacctgttcatctttactaggtaacaatgaactgttttccaaagagataaggccaatttccctatattttcattttatccaacttgctaggtctttgctaacctgataaactatccaaatgaaaatttctgagaataaaaagggctctatcagtcagggttctccagagaaacagaaccaatactactgaagagatttattttatttgttttttctttattcttttcttttttcttttttttttttctgagatgggatctcactctgttgcccaggctggagtgcactggcataatcttggctcactgcaacctccacctcccaagttcaagcgattctcctgcctcgactttccgagtagctgggactgaaagcacacgccaccacagccggctaatttttgtatttttagtagaggcagggattcaccacattggccaggctggtctcaaaactcctgacctcaaatgatctgcccaccttggcctcccaaagtgctggaattacaggcgtgaaccactgcacctggcctggaaaaagatttatgataaggaattggctcatgggattttggaggccaagaagtcccaagatctataggtggcagctggagacccaggagagctgacggtgttaagttccagtccaaaggctggcaggctcaagacccaagaagagctgatgtttcagtttgcgttcaaaggccggaaaagacccatgtcccagcccaagcaatcaggcagcaggagttccctcctactcaccctttctgttgtagtcaggccttcaactgattggacggggcccacccacctctacattagggagggcagtctgctttactcagtttaccaattcaaatgttaatttcatccaccaatgctcttgcagacacatacatcgaagaatctttggccaaacatctgggaaccctgtggcccactcaagttgatgcataaaattgataatcaccagggtcttacatggtaatctccctcccaacccaatggagtctaggtggttcagaggtggtcctctgagcagaatgtaatacagttctaggaagacggaacttctagagagtattttccttctcgaaacttgttctgaccatgaaaggcaactcgtagcagcaagagcttgtcaagtacagaacatttatttgatttatttattttctttgacacagagtctcattctgtcacccaggctggaatgcagtggcacaatcttggctcatggaaacctctgcctcccaggttaaagcaactcttgtgcctcaagcctctcgagtagctgggatttcaggtgcacaccaccatgcctagctaatttttttgtatttttagtagagatggggttttgccatgttggccaggctggtctggaactcctgatttcaggtgatccacctgcctcagcctcccaaagtgctgggattacaggtatgagccactgcgcccagactaacatgtatttctccattcaatcaacacagattcccaccttcctccccacctcccagtacatttagaaattcaggaggagggtccttccattcagaagtctagcttagaaattctccctcctctctcctccctttagtctctccgtttcttcttccttcctttccctcccctacaccccaacttcttgtatattttgtccaagacaaactgcttcttagatcttctgcaattaagggcatctcttcccatccgatatgtacagtggccccggcaatggtgacctgttcctggaagatgctatttaaaaccctgtgtgcaactaaagtgacgcagagctcctgaatgtggctgaaatgtgtcaagttacataaacgcacatgcttcattttgcccttggcttgaagctcttcctaacagacttcagaattatcagctcattaaaggggaaaaaatgcaggtttataaaaaaatcttaaataatcatcataataaaatcaaggccccagggtagagttgcacttaatggttgagagccactctcaagagagttggcacctcccaagaggatctcaaggaaaccacagtgaatcccatcttctcttggggagaggaatattttctgggaattctctggagacaaccataagcagccctgatgccctactctcccacgaagcacaatgttaacaatgaaaggaaagaagggaattttgaattgcttactacctaggaagggccacccaatttcatacctgtgtctgttttcatcccttgctatgatgctgcagggagatatcactgtcccccttgtactgatggggaagccgaggctgaaacaggacaaagtatttgctccaggccacacagttggtaagaagtagaattcaaagctagttgagagaccccacagcttgatgactgagaccatggactctgtgatatgcaagagaggtgataggaagggaagggcatggtcgctttaaatgctacagaaggaaggaagggaagtgctgggtagaggagggtgtggtccctggtaagggctccacccccacgcctgtgcccacagtcctaggtgaggacaggcatttttgttttcctgcccaaatgttgcatttcccaagaccaccctggcctgccatgcccccatcctgtatctataaaaaccccaagaccctagcaggtgacacacaagctgctggacgtcaagagctgcagatcggcaaagaagacacaagcgtctggatgtcaagaagacgtcaagaggaacacgctggcagaagagcacatgacagatgctggcaggccatctactggcggaacaaagtggagtttggcctgggcagtcggaggagtgcccaggctgctgggcggcctgactccagggggaaaccttcccactccatccccttctggcttcccccatctgctgagagctacctccactcaataaaaccttgctctcattctccaagtccaggtgtgatccgattcttctggtgcaccaaggcaagaacccaggatacagaaagccctctgtccttgggacaacgtagagggtctaattgagctagttaacacaagccgcctatagatagcaaaactaaaagagcaccatgtaacacacacacactgaagcttcaggagttgtaaacatccacccctagacactgccgtgggatcagatcccgacaactggcccatctctatggtcccctagaggtttgagcagcggggcactgaagaagcgagccactccgacatcacacaccctgcgagggggacaagggaacttttcccatttcatctggacttagaatgctatttcatggaaactgtacaaccatgggcaagagacttgacctctcagtgcctcagtttcctcatctataaaataaaggctatgtgatattttctgcctggatggtgatagtgaggattatatgaatcaaaacaataaaacactagaaaactagccagcatagaaaatgttttaaaagaactgctatctacaatgcacacactttccgtgtgtgtgtgtgtgtgtgtgtggttttcaacacaatgcatgcactattaccccattttgaatctctgccaggttcccagggcctgtcctctttaccacacttggtacctcttaataaaacgaagttactggatttcaagcccaggctctggaaatattggaactcaaaggctgtgctcttgaaatatgtccttcgcacgcctaccttccctgcctgctgcagttctgtctctggctgattaaaacctgcttttgcccagagcaagctgagtggcagggcatgctatccctttttatgaaaatccagcaagcgggtgtaaaaggaagataaccacacccctgccccatgtggaggccaaagatacttaattatctgaaacccagataaacagcaggagcgggttggtagactagatgtggaaaagctgaagcgagccagaggggctgcaagaagaattattaaaaactaatgatgtgattcagtgctggaaggaaggcgagaaaatgagtctgaggttgttgacagcctctgagagttcttgcctgcagtaagatgggggcaggatgggtagggagatggggtagcagtgggaggtactaggaggtgggtggaacatagggtcaagaagtgagaaaacacaggcgtttcaagcattatctgccagatgtttgctgcctgttttccggaggcagttttgtgttactgccctgttccagtaaagttgataaaattgccaagcctcaagaaagagatctctaaatgccattttgcacattggaaaccaggggtcaagcaaagggaagtcagcaagggaacacacactggaaattcagagtgaggagcacactcagagttcacacctgcctgctgggagctcacttatggctggtctgtgaacttgacctcctgggcctgattcagggcaagtgggtgtcctgggttggggtggttcctgatgcatctttctgttagtaagcatttgatgtgggttatgtgagcatgtgtgtaaagggcttagcacaagcctaggtccacaataaggggtctgtaaatgccaactgttgtgggccttaagagttattacgggaaccgggttctttttctacagcacattcccagcagactgacttcacaaactttgactgtctgcattggagctcatcattttggtctctgaaataaacagtttatgtgcagagaaatggtgatactgaaacaccaggggtttggtctaggtcctgctgctcgccgcatagaaagcccatcactgacaagatgagtattgccaaggaagattttaattgcgtgctgcagccaaggagatggagctcagtctcaaatccatctccctgaccaactaaaactaggagtttacatagcagggaagaaatgtaacaatgtataagaaaacaggaactcgggaggagcaaggaagcaatcatgaagaaaacaggaactcgggaggagcaaggaagcaatcatgatgaatgaggggtctggtatctcatctctggatgtggtaatctggtgagtttcagttctttgatattttttgagaggcctgggggtcccttcctgaggaaataactcagataagacaaatgagggcttcaagctttaagatcagaaaggtcaacttctgtatttatccaaaagagtatctatgggccgggtgcagtggctcatgcctgtaatcccagcactttgggaggccaaggcgggaggatcacgaggtcaggagatcgagaccatcctggctaacacggtgaaaccccgtctctactaaaaaatacaaaaaaaagttagccaggcgtggtggcgggcgcctgtagtcccagctactcgggaggctgaggcaggagaatggcgtgaacccgggaggtggagcttgtagtgagtccagatcgtgccccactgcactccagcctgggtggcagatcgagactcttgtctcaaaaaaaaaaaaaaaaaaaaagaacatctatgatgggactattgggtcagtttcaatggtacagaaaagtccaaagcctgacttagtaaaatctgtccaagttccaccacacacaattcaacattgcagaacaagacaagaccaagtgtgggactgggggcatctaatcgggggtttgtccttgcgttgtaaaagagtaaggcaaagagaaaaggggtcctggcattgagaataaagataacagaacagcttaaggttaagggctctgccccacgagacagacaccttgggttcaaatcctggtactactttatcctagctggtgacctcgaacaagtcactttgcctctccgacctcaatttcctcattcataaaataaaagagatagaacttactctattggggttcttgcgaggactcaagaagctaaaattaaggggtgaatgcatgcaggggacgtagcactcagggtggcatatcagtgcccgcgggaaacagcaactctgtgtgctccctcatgtgtccaaggtcacagaccaaggacgtcagagagccaggatgatgacctctgatcccacatctcccgagttctcaccattccctgggagtagggaaatctccctcctcttcttcctcactgtcgtggcaggaaaagaggaagaacaggcaggggctgtggatcttgggggaaaggacaagttaaatcagctgagaaaaaggaagcccatgaaataatctaaatgtgagggtgccagagctttggggctggggcaggcagtcccccccggactcatgcttaaaagagtcaatgcaggctgggtgcagtggctcacacctgtaatcccaaggaggccaaggagggcagatcacttgaggccaggagttcaagaccagcctggccaacatggtgaaaccttgtctctactaaaaatacaaaaattagctgggcatggtggtgggcacctgtagtctcagctacttggaaggccgaggcacaagaatcgcttgaacccaggagacggaggttgcagtgagccgagatcgcaccactgcactccagcctgggcgacagagcgagactctgtcacaagaaataaaaataaaagagttaatgctgcgagaagcattggaagtgagacacattctcaaccatgaaataggggctgactcacatggtctctgcagcagctgatgggcattaaggtgattacttcgcagcaggtgtgacaaaacaaatctcaccgcggctattacactacggccaccgggagtctttcagcccagggctgtcacattcctgtcacttaaagcttcctcgcctgagcctgaaaatgatcagtagggtctgaaatttttttctctcctactctgtgccaagagtgtctcacgtgtgtgtgtgtgtgtgtgtgtgtgtgtgtgtgtaagaggattgttggggtaaggatggagtgagaaagaataatttattgcacatttgacaaatattcatgacactcagtgccaggcattgttccaaatgctgggaagacgttgtgaggaaattggataaggtctctgccctcatggagtttataaacttgaaggaattatcttggtagtttatactcaaagcttccttccttcctccttttctttcctcccttccctcccttcccctgtccgcctctcccctccctctccccctcccttctctcccactcccttccctccttccctgattcacttaataaacattctggagtcagactgcatcctagcttggctacttattagctaatgcagcatcaggcaaattttgtaacctcccattacttcccatccaaaatggagataagaacaggacacactcacaggataagccccacagcttcgggaaaaaccatctctgaggaacagccaagaaagtgaattcaagcagggccttggctcaaagcctgttggcctggagggctgaggatgatggatgaggactttgtgcagatctgagcatactgtgtcctttgtcctggttgccttagtgtccaccgtctatctctgagattgatgaggcaggtgcaccactgggcaagctacacaccatacaaggctgagcctggttggggagcgtcatcaccatccaatactgtctgtaggactccattccagcaagacatctgggggcctggaagggggtccctcccctggaaaatgtcacagaatccctgatctatgtcctaacaacactcaggtccttctgtatcctttagataatttgatttatcctagggtctactgttgacatttgtccctaagtggtcagattcatgggctagatgaggacattcaatgagatcacaagtcaagagcttactgcagagctgcctcttaagaaatgctagttattcttgtccttaagcctgggctaagtgacaggcatgtgcacatccatacacacacacatatccatacatccatacccacatccacacacgcacacatccacacccacacacacatccacacatgcacacacatccacacgcacacatacacacccacatccacacacacacccacacaggcacacacacatcctcacacacacatacacacacacagatccacacacacacatccacacacccacacacatccacacacacacatccactatacacatatacacacacatccagacacccacatacgaacacccccacacacatccacacatccacatccacacacatccacacacatccacacaaatatccacacacacgcgcacacagtaaaggtcagtaagtgcacagtggtaaccattgttcctgcagcagcaccattaggtaaataaaaataaatatatatttttaaaatttttaatttgtatttgtatttttaaattttttgtatttttgtagttttttttttaaacaaagggatcttgatcttgattacttaaaagcaagactcatgttctctgtcttccttttattttattattattttgggatagtttctctctgttgcccagactggagtgaaatggtataatctcagctcgctgtagcctccgcctcccaggttcaaatgattcttgtgcctcagcctcccaagtagctgggattataggcgcacgccaccacacgtggctaaattttttgtatttttactagagacgggtttttgccctgttggccaggctggtctcaaactcctggcctcaagtgatctacctacctccgcctctcaaagtgctaggattatagatgtgagccaccacacctggcctctctgtcttccttttaaaacacagggaggaaaggattgtttctgaatgctcacgtatcattttagcttatttccagacaaaagggaagatatttcttagccatgaagtggaaatgttctagaaccttcctcagagatgtctgtgaaaaggaattatgcatgggaagcatttagctcacggtcttgcacatgcaaagggctggataaatgacagctgtgaatactgcagttcattttatgtggcgagagggaaggtcatataacgtcccagtgagagtatgggctttcaggagttcgaggctgcagtgagctatgacggcctcactgcattccaccctggacgacagagcaagaccctttatctaaataagtaactaaaaatttataaagaagaggtgttttaaaagcagaaagagctgagtctgaaccctaactccccatttactagctgggaggccttgggcaggctgtttcatttcttcaagcctcagtctcctcatctgcaaaatgggatgatcacagactcagcctcttggtgttgtgaaaaatcagtgaaagaataggggaggggcctagcctgcctaaaagatttgatgttcctgctgcttccagtggagggtgggtgggtgggtgagctgacaggcagcgcagggaattttccagccaggttgcctcttaacctctggtttggtttggttttgcttgtaacctttcactgtttgtcggcaaaagcccaatttttaaaaaaactttttcattttaatttgatgtttttatattttttgtatttttaatttttttcttttagcgacaggctctcactgtgtctcccaggttggagtgcaatggtatgatcatagttcactgcagtcttgaacccctgggctaaaccgatccccccacctcatcctcctgagtagctgggacaaaggcacacacagccacacacagctaattttattttttgtagagacagggtctggctacattgccctgtctggtcttgaactcctgggctcaagcgatcatcccgcctcagcctcccaaagtgctgtgattacaggtgtgagccactgcacctggccttaatttgtgctttttagagacagtgcctctctctgtcacccaagatggagtgtggtgatgcgatcatagctcactgcagccttgaactccaggactcaagcagtcctcccacctcagcctcctgagtagctgggaccacaggtgtgcaccaccacacactcagagcccaactttttaaatgagagtttgtcttgaaagactacctgcaactcttcaggaatgctgtgctctgtagataatgaacgttcaacccatgtgactctgatgttgctagagaccccatcttgttatttttccccattttagaaatgagggaactgaaattcagagagtccaagtaacctgcccaagctgacaggcttaaaaaaaactcaggcctatctgagagcagagtgtgcgctcgtgaaagacaccagcacagggtacagcctctgcattcccttccctctttcttccccgtgggtgatacagaaagaacaaaggttttggagtcagattggcctgaattcaattccaacttcagggtcttgcttaaaacaggagatgacaatatccacttccctgggtggtggtgagaatcaaatgaggcttttaaaaacgtgcataatgcctttatctcagtgcctggcacacagtagacgatcaacaaatattaggttttcctctctcctccacacacttctttccttggccacatccccaaaacactcacatgaacctgagctcagactcccggcggaccaagacttcccggagacgctgaatttttgccatctccagctcaatctcctctggcatcatggttgtctccgccatggagatgatgtccagctgatctgtgcaggagacaggaaatacaaccatcaggaccccaaggctgcaccatgggacagaccctgacatggttccagggcacagccttgctctgcgaccatcatacaccttgaggacagacttcagcctgtgccgcaaatgtgtattcgtgagcacaccctttgggaaccagaaaatgtgttttccaaagtaatttacttcgtttgctttgttttgttttgtttttagacggagtctggctctgtcgcccaggctggagtgcggtgaagcgatctcggctcactgcaagctccatctcccaggttcacgccattctcctgcctcagcctcccgagtagctgggactacaggtgcccgacacctcgcctggctaatttgttgtatattttttagtagagacggggtttaccatgttagccaggatggtctcgatctcctgaccttgtgatctacccgcctcggcctcccaaagtgctgggattacaggcgtgagcactgcacccggccttgtttttgttttttgagacacagtcctgctctgttgcccaggctgcaatgcagtggtgtgatctcaatctcagctcactgcaacctctgcctctgaggttcaggcgattctcccacctcagccttataagtagctgggattacaagtgcacaccaccaggcccggctaatttttgtatttttagtagtgatggggtttcaccatgttggccaggctgacgtcaagtgatccgcccgcctcaacctcccaaagtgctgggattacagtcgtgaggccaccacgcctggctgggaactttgttatgatggctagtggaggctcacaagtgggctcacaaaagcctgattaaggccttgtcagctcctgcctggtcccagattctaagcctctgctccccctgaccacgaccactttgccctgtggtctaagcctctaagaccagccgactctaggcagaagaaagttttatcataattatcttatagtaatactactaccaagtagtgttaagtattttttcatttgttttggagactaggcctcactctgtcatccaagctggggtgcagtggtgcaatcatagctcactgccgcctcgaaccctgggctcaagggacccttccgcctcagtctcccaagtagctggaactacaggcccacctaggtaactttttaatttttatttttttgtagagatgggggtgtcactatgttgccaaggttggtctcaaactcctggcctcaggcgatcctcccaacttggcctcctgaagtgctgggattacaagcgtgagcatacatacggatatataaatatgtgtgtgtatatacatatatgaatatatgtggttttttatatatataatatgtgtaatatacacagacacacttttttttcttttttgagacggagtctcgccctgttgcccaggctggagtgcagtggcacgatcttggctcaatgcaaccttcacctcccgggttcgagtgattctcctgcgtcagtctcccaagtagctgggataacaagtttatgccacgacacccggctaatttttgtatttttcgttgagatggggtttcaccatgttggccaggctgatcttgaactcctgacctcatgacccacccgcctcagcctcccaaagtgctaggattataggcatgagccaccgcgcctgggcagacacactttataaagactgaaaaagtccactaaaatgttagcagttaaaatgttaatatatatgcgtgtgaatgtatatttatactattatatgcatatacatatatccactgtgatgtaggtcttatttttctaatataaagttaggacctcactatttcgttatgtgttcttttcacctagcaacatgccttgagcgctcctgcctgtccttggatggtcttcctcggcagcagcatggaaggcggggcggttttctatttgtggctgtatcacgaagcacttaagcaatccacagacatgtaggttgtttcctattttttccccactgtaatcatgaggaaaaaaatgtaagaattattttcaccgtaagaatgttccagtgaagaacgttctcaaagtgaaaacttcgcacacatctacagggttccttcgggctatgtttctagggtgaatggctgagatataagtgatgtgctattcaaggcctttgatcggtagtgggggagactcggggcaggagatgtttttggcgtaccctgagacaccatcacatcatctgtatctgctaattccttccacacccgcccccaagatggagcccaccccacacctcagttctacaagggcgtctgtctttttccttatactcaaggaataatgaaagttggtataccttatacccatgatttggaaagttgttctctttttcctttttctcttttttttttttgagacggagtatccctctgttgcccaggctggagtgcagtggcacaatatcggctcactgcaacctccgcctcccggattcaagcagttctcctgcctcagcctcctgagtagcttgggttacaggctcgtgccaccatgcccagctaatttttgtatttttagtagagttggggtttcaccatgttggccaggctggtcttgaactcctgacctcaagtgatcagcctgccttggcctcccataatgctgggattacaggtgtgagccaccacaccaggtcttcttttttctttttgtagagatgaggtctcgctatgtggcccagactggtctggaacttctggcctcaagcaatcctcctgcctcagcctcccaaaatgctgggattacttacaggtgtgagtcactgtgcccagagaaagttgtcctgtttctacctgtccaactgccttctatgtcctggggccctggcccttgcacacgtgcacagggtttagggcgctgtgatttgcaggcttccctgaagtcagtccctacctgcttggatctctagatagaacagcgccctcttctaggagtccacctgatgcatttgtccacctgtgggactctcccggccctgagttgttcagcagacgttggattctcagtaaattggagttcctttccattacctaccccgtgatgtgtccgttccatgtgccaaaattatctgcttcccctccaccaatcaaaacaccttattttgctaaagagacagaaagaaggtaattctctggagttgattctcacattgaaatgaatggcctctcttcattctctctgagacaattccccctttttttttttttttttttttttttttgagagcaagtcttgctctgttgcccaggctggagcgtggtgatgcaatctctgctcattgcaacctctgcctcccaggctccagcaattctcctgcctcagcctcccaagtatgtggatctacaggcgcatgtcaccacgcctggctaattttttgtatttttagtagagacagggtttcgccattttggccaggctggttttgaactcctgacctcaggtaatctgccagccttggcttcccaaagtgctgggattacaggcgcgagccaccgtgcctggcctgacaactcccagttttcaagagaaacagtaacaaaggcaatggaaaaggccaagcaattatatggggagaggaaaatatttgacctgtcagtcatcagcctattgaagattttctcctctttgagttcagcatctcagagcaatgtgtgcttcttttatattttcagggagcaacaatacttcatgaaatagataagtgcagaacataaatagtgcagaatctgctattgggttggagagggggtcactgaacaactgtataagtgggaggaagagagtggaggtgggtgaatgggaaaaacatgaaattggagagattcacaatcacctcctccttgccttctaaagatggcgggtcccgaagattatctggccacctggccgagcctctgccagggaagggtgaaaagggagacacagtggagggagaggagggagtgtcaaagagaagcaggaaggagagaggtcagaggagccacctcaggctgtggcttggggagagggagcgatgtctgtttgcagaggatttgtaggaaatgtctcatgtgatgtgctgcctaaagatctcctggggccatctggttatgcttcaaggcccctggaatccaatttcgggtcctactactgtccctgacaccatgctgtggtggctcctgggattgaagcagtgaggacaggcttgagaaaggagggaaggagggaggaataggatcgaaatattaatattggctgggcacggtggctcacgcctgtaatcccagcactttgagaggccgaagcgggcggatcacctgaggtcaggagttcgagaccagtgtgaccaacacggtgaaatccagtctctactaaaaatacaaaacttagcctggcatgctggcaggtgcctgtaatcccagctgcttgggagactgaggcacgagaaccacatgaacctgggaggcagaggctgcagtgagccgagatcataccactacactacagcctgagggacagagtgagactacgtctaaaaaaaaaaagataattaatactgagtgctactgtgtgctgtgatgctaccaagctagaagaccagccttaccagatcagatggcctgggtttgagttccagttctgcccctccctggctgtgtggccttggggagttggttaacctctcagcagctctgtttctcctctgtaagggagcccaccacccaaaacagatgtgagggatgaattaccccggcacgtcacgtttaatatatgcttgcaattgccctcgttatgaccgccgcacctgctctgcccatcacctcttttaatcctcgccataagccagcaagttcagtaggttctcattttcgcaaagaaacaaaggctcagcgctggcaagggaaagagctgagtccaggtctggcttcaaattcatgctttttgaccctcacagctgcctctggtccaggcagctgttctaagtccgacaccccccattcattcctatctcagagtcaagcgtggtgccataacaattcatggccagtggggaggcttaaaacaaaaggaatttaatctcttggagttcgggaagccagaagtcggaaaccaaggtgttggcagggtcacgcgctctccagaggctctagggatggatcttttcttggcccttgcagcccccgctggctccttggtttgtagtattaggttggtgcaaaagtaattacggtttttgccactggatgtaatagcatcacttcaacctctgcctctgttttcacaggttcttcctccgggtggctctgtgtgtcttcttttctgtctcattagatttagggcccaccctaatccaatgtgagctcatctggatcctgatctgaattacccctgcaaagaccttatttccaaataaggtcacattctgatgttttaagatgcacatgaacttcaggaggccacaaacccacaagaatgaatggccacagccttgcaagcttcctgacaacaatgtcactctctccaggggcttgagatcctgcacacagagcacagccttggctggaagcagcaggggtcccagcgggagtcaccagggggtgagggaagtgcatgggggaagtggggtctggcaaaaaacagctaggcgggggcagtgtcagaaatcctcatttgacactagtcatcagccgcaagacctcgaatgagtccctttatgtctttgcgtcactttcctcctctgtacaagaattcaatagttacctgtgctggaggctttctgtgtattatctcatttaatctctattttactgagatgactctgaggcttagagaaggaaagtgacttgttcaacatcacacagccagatcattgcagagatagtattcaaacccagcttgtgctctctctctccccccccaccccccttccactccacaaccacgtgaccttaaccacgtaatccagcctcctggtgagggctgaatgcatttgtgcctgcgaaagtgcgtagttaaccaccccacgatatgagtatccttgtttttctcatcacagttcagatgggcaacctgatttccatgggacagatgctgaaaacggcaacacaccctggggcgaggcgtgggacgaagagaattaatcacatcccaggaactggcattttacctccatccccgggggaggatggaggcggtggtgccaggctccaggtgcttagcttggatttggggcaaagaatggaacaaagacctatgttgaaaagtcttgctcaaggatgtttttcttccccaagagaaaggaacgaagcctaaagcttgaatcagatacaaatcgttagaatcctttcttgccatgagctgtctctgcatcaggcactgtgttgggctcattgtaaacctcatcttttttttttttttttttttttggtggggcagggtctcgctctgtcttccaggctggattgcagtggcatgatcttggctcactgcagcctcaacctcccgggctcaagcaatcctctcacttcagcctcccgagtagctgaaattacaggttcactccaccacacccagtgactttttttgtactatttgtagagatggggttttgccatgttgcccaggctggtctcccaactcctgagctcaagtgatctgcccatctcagcctcccaaagcgctgggattacaggaatgaatctcatctcatttagtctgcacaataccttaggccaggggttgatatcctatggccaggggaccaagcgcagccccatgcttgatgttgtaagtagagttgttctggaacactgatcacgctcattcatttacatgtcatttatggctgcttttgcattgcaaaaactgagtagttgccacagagactccctggcccacgaagcctcaaatattcactacctggctctttatagaaaaagttggccaaccccttccctgggtggtatactgtaatctctccagtttaaaagttaggaaagccaggtttatccagtaacgataataactaacatttatcgagcatttatcacatgccagcacctgtgcattaccttatctgattctcaaaacagccctgggtggtcagtgctgttatcccatttcatagatggggaagtcgaggctcaggaaagggagtaagtgatggaggtgagatttaaaacaagatctctcttactccaaagctcttgttgtaatcaaccatattcatgtaagaactacctccctacgtaagtaccatcatcatcataacaaaactgagtagactgtattgctttagacacagagggagtagttattcccagacatcagtgggcaaggtgaatatctagggaggttgtttaagaaacaattccctgcctccacctccaaggattaggataaacctgggttggggtgttgtgtccagggaccttaatgaaggaggtcttcagatcagagtgaaaaatgctgatacaggacctgaataaatgagtatcacacacagtcagtttctttccagtctgaacttgtgtgatagaaattagcctgctagactgttcctttcttgatcacattttccaactagaaggcaggcatccgacagctgccaaggaatgtctccacgaggaggacaaatcacgggaagaaacgggaggagcatttcaagctggctagagacaacaagtctctcacgcacacttccaagcaagagcttgcttgctgtgtggagacagcaaagcatgaaggcacagacgtccccagggctccaactgccactgctgtcattgagcttccaggagctgagtcacttctgggggaagaggcagctaaatccatcttcccatccccaaatgccaccccagggagatgcatgcttcctgagcggtggcaccagcaaacaagagctgagcacccgggcagccctggtatgcaccagcaggtttaatcactgatctcaaaacaaaacaaaaagtaaggctacccagggacaggagtggtggaggtgatagaggatgagggctggtgatctaaaaacttctagtttaaatacaagcttggagggttaaactgctggggaccagagagatacctttcctagcccatcttttccaatcaggggtcatggtaggaatttaagctcagggtgccctgcacaacctctgcctttacttctgctttataactttacgtgcctagtactggccccagagcttgctcattttgggtgtttaccggagccatgatctagctcatatcaacctctctttctagattaataaaatgaggcttagagaggtcataagtgattggtcaaactcactcactcaattgttgcagcaacatcaagggttctgtctagatcctgctactcgctgcacagaaagccaatcactgaggcaatgagtattgccagagaaggctttaattgggtgctgcagctgaggagatggaaagagactcaaatccatctcctcaacccactaaaattagaggtagcaaggaagaaacgcaaccatgtgttacattgtgatacatccctattctttttttttttttctgggaaattattaggaaggggtaaggaagagaatctggtcaacaggatgcaggtggttggttaggcaatcgtgatggttgaggagtctggcatctcattgtccacatatagtgatctggtaaatttcaattccttaatactatctggaaggccgagaggtcagtttcttgagaaaggaactcaggtaaaatgaatgtaactttctaaaattttaagattaggagggggctgggcacagtggctcacgcctgtaatcccagcactttgggaggctgaggcaggtggatcacaaggtcagatagagaccatcttggctaacacggtgaaaccctgtctctactaaaaatacaaaaaattagccgggcgtggtggcgggcacctgtagtcccagctacttgggaggctgaggcaggagaatggtgtgaacctgggaggcggagcttgtagtgagcagagatcgcaccgcggcactccagcctgggtgacagagcaagactccgtctcaaaaaaaaaagaaaaaagaaaaacaaaagattaggaaggtaaatttttgtgtttattcaaacaaaacaaaacaccgtaaacatcagttctaaggggcaattggggcagtgctataatgagtggtagaaatgaaactcaaacccagatctatctgatcccaatgcccatgctctaaggtcaaaagagctacaaaacagtgtttccaaaactctcaacactgcatagaatttaccccagctacatattctgtactctgtcatataccactcagtatgtcatgacattcacttttttttttttttttttgagacggcgtctcgctctgtcacccaggctggagtgcagtggcgtgatcttggctcactgcaagctctgcctcctgaattcacgccattctcctgcctcagcctcccaagtagctgggactacaggcgcccaccaccacaccagcctaattttttgtacttttagtagagacgggtttcaccacgttagccagggtggtctcgatctcctgacctcatgacccacccacctcggcctcccaaagtgctgggattacaggcgtgagccactgcgcttggccgacattgactttttttactcaaactccctaacggaaatgtcccatgacatccacagacaataaatgactcttacttggcataattagaaaatagccatgaaaataaacctgaggaaacaaagcaatactgttaaattcttgctaaatactatagcctgcttaaggttcagaatgaagcttgaattttctttcttaacaaggtgaatcagcaagtactaggggcattaaagacaaagctagcaccaaattgtggctttctcctttaggtaatcaaaaaggttgataattggggagaaaatgcgtagctttcctgaagggaaattcattgctgtttgatggtacaagcatgaaagtaccactgggggtacctatcccatcccctgttgtagaatagaattccagtcctttgcgttggaaaggtcttaaacgacgttttggtcagcctcatacctgtgttggataggatgtaaaatgacttggcaagatgtggttcccagggtccctcaacaaacggttctcattcaaacttcagtgagaactcaagctagaaggacaattctcagccatgggttaagtcctactcaaagaggaatcagccattttgagcgattatttcaacccagctcatataacaaaggcaattaaatgaagggctgggggtgggggtgctattcatttcagtcattggaatatacttgggtcacagccgctgcatttagggaaggacatgagggactcaggtagggggagtcagtgttgggggagaatcaactttcacctaatatgtccttttctcttgtttgggtttttaaatatactttttttttttaatacttttatatttctagaaaatgtggctggatgtggtggctcatgtctgtaatcccggagctttggaaggctgagggaagaggatcacttgaagccatgagtttaagaccagcctgggcaacagagcaagaccccatctctacaaaaataaaatgtaaacattagccagatgtggtggcacacagctgtggtcccagctacttgggaggctgaggtgggaggatcgcttgggtccaggagtttgagggcttcagtgatctatgatggtgccactgcactccagcctaggtgacagagtgagacactatctttaataaaaaaaaaaaaaaaatttaagaagagttgcaaagagcataaagaattcccctctactcctcattaaatttccactattgttaacattaccaagaagttgacattggtgcattgttattaactatattcattgaaattttagcaatttaccaatggtcagatgttacatttgcaaaacagatttaaaattaagaagagagaaaagaaaaggggttggcgtgtgcaggcaccatggggagccaggccagcccttgaagagggcaagagaggggagtggttctgggcatgggcttttgggtttcagagtccagctctcacgcttgagccatgcatcagtgactctgggcacctcagtttcttcatctgcaacactggggaacaagcatacccatctcacaggtgattcatgtaagtgacaagcatacagaaagttctctgtaacatatgtttgctcttatatacatttaataactatgcattgagaacctgcttcgtggcagaccctgctctaagcaatggggaaggagcaatgagcaaaacagacaaaaatctctgcccttgtggacctgagcttctagcaagaggcttacactgttgtggagaacagttgctctaataatctgcaggggtcattggcttaagacagacgtcgcttcaagccctggctctatcactaattgtgcgacctgggcaaattacttgatctccctaagtctcagtttcctcttctgtaaaatgggactaataactcctgcctcatgaagttgctgctgtagggatgaaatgggatgatatacttgtccctcagtatccgtgtgggattggttccaggcctccctttggacaccaaaatccttggatgttggccgggcgcggtggctcatgcctgtaatcccagcactttgggaggccgaggtggatggatcacgaggtcaggagatcgagaccatcctggataacacggtgaaacgccgtctctactacaaatacaaatacaaaaaaaaaaaaaaaaatagccgggcgtggtggcaggcgcctgtagtcccagctactcaggaggctgaggcagaagaatggcgtgaacccgggaggcggagtttgcagtgagccgagatcgcgccactgcactccagcctgggcaacagagcgagactccgtctcaaaaaaaaaaaaatccttggatgttcaagacccggatataacagggtgaaatatttgcatagaagccccacacatcctcctgtagactttaagtcatctctagattacttataatccctaataggatgcctacacatcacttcatttacacagattcagcataatactcaaagttttgcttcttggtaatttgtggatttttttcctgaatattttccatccataattggttgaatctaaggatgcggaacccacagatacagaggaccaactgtatacaacatgtgcttggtgtagtgcctagacatcacaaagagtggtcagtagcattattcctgccatcacagtgcctttccctgaaagaagccagactaacactggggagaaaataaaattggagccaccatcaaatttgaagaacacagactcatggtcatggggaccatctcttggcccctctaggtgagaccacagccccgcagctccaacagacccatgcctgccctgagaagagaatctagagggggccccctccagccttttgtcaagaagccagttgctgctattgacccaaaagagagtcttgaatcccaagggaatagatctgcgccccatgaccagggagccaatatctgaatgcatttcaaaggctcctggtggcactctagacttcgttgtcatcaatcattcatgtaggaaagaagctcattccaacccccaagcatcctattacgggatgcaccaagtgcctcgccttcttgctataacgtgaatgtaatgggaagccgcccgttgcttttaatgagtcaccgtttcccaaagagatgaagtcactgcttttaacccagaagctcctggctgctcgatttctcccagcctgcctcgtggagaggatgccactgggcccccaagagcgatcatacctttctttgcactccgccgtcccatacatcccgtctctgtgaggtcgccccacatggaagaatttgcggctgaggaaactgacaggcttcagatcctggctatgattgttattctccagtggcacctcaagcacatttttttaacttctgcgagtttctgtttccccagccacatctgacgtgtcaaaggacacaaaagtaattcaggaggacgcaccaacagcacgtgaagacgcaggcattggcgtcaagcagacatgagtagatggtccggcatctttctaacggccgacctcggcaaatgccctaacctctttgagactcagtttccttatctgtaaatcgggggtcataaaagagagaatgtatagatcagtgcggtccaattgaaatagaacactagccacatatgtaattttgaacattccaggaaccacattctaaaaaataaaaaaggctgggtgtggaggcacatgcctgtaatcccagcactttgagaggccaagggtggtgggcatatcacttaaggtcaggagctcaagaccagcctggccaacatggtgaaaccccatctctactaaaaatataaaaattagccgtggcagagcacggtggctcactcacgcctgtaatcctagcattttgggagtccgaggcggtggatcacctgaggtcaggagttcaagaccagcctggccaacatggcgaaagcccgtcttcctaaaaatacaaaaattagccaggtgtggtggtgtgtgcctgtaatcccagctattcaggacgctgaggcaggagaattgcttgaactggggaggcggaggctgcagtgagccgagatcgtgccactgcactccagcctgggcaacagagggagactctgtctcaacaagaacaacaagaacaacaaacaaaaaaaattaactgggcatggtggcaggtgactataatcgtagctactcagaaggttgaggcaggagaatcgcttgaacctgggaggcggaggttgcagtgagccaagatcgagtcactgcactccagcctgggtgacagaacggactccatctcaaaaaaaaaaaaaaaaaaaaaaagtaaaaagagctgggtgcggaggcacatgcctgtagtctcagctactctggaggctgaggcagggggatcacttgagcccaggagtttaagtccaacctaggcaacatagcaacgagaccctgtctcttaaaaataaaaaaaaagataaaaagaaatgggcgagattaatttcactaacatattttatttaatccaatagatctaaaggattatcagttcaaaatgtaatcaatatattaaagatacgaatgagatgttttatatcctttttggagggagtatggaagtcttaagtccagtatgtatattttaccctttaaatagatctcaattcaggccaggcacggtggctcacgcctgtaatcccagcactttgggaggccgaggcaggtggatcacttgaggtcaggagatcgacaccagcctggacaacatggtgaaaccccatctctactaaaaatacagaaaatagccacgtctggtggcacgtgcctgtcatcccagctacttgggaggctgaggcacaaggatcacgtgaacctgggggatggaggttgcagtgagcccagactgcgccactgcactacagtttgggtgacagagtgagactccgtctcaaaactaaataaaggaagaacagatctcaatttggaatggccacatttcaagtgctcccaagtcccaagtcattgttcaccatcctgggaccctccattcatctccttctttcttttctccctgataccttccccttcctcaaagattctgtctccctgaggtgtttctccatttcaggactcttctgcttccctcttaactgctctcatgaaaggacttctgatggaccctctcgtcccacctccagcccctggcagcctatgggtggccctgcctttggtcagggcctcagcacgttcaacctgggtggagccacaggtcacacgagaccctccccttcagcagggactgtgaggaaacccttagaaggagtgtgtgcggtgcaggccccacaggtcggctgccccctaaatcctaataggactggctcagctgtgacccagaatcccctgcagaatgaatgcctgacttcagctctctcaggcagtgtagtctgttgggagccaggaaggtggggagaaggacacaggtatctctgtggaggggactccacagcagcatctgagcaaaggcaccagaaaactggagatgggcagtgataagttgcaaagagccaacagaattcccctctacccccctcactcaatttccactatttgttaactttaccaagaaactgacattggcacattgctattaactatattgattgaatatattgattgtgtgataaggggcagctgggattttccagtaccctcatccctttgtttccttactccctaccccgactccttatctggagctggaaggtctttgatgagctgaagaaagacacgggttattaaataataatgctgcgacatcttcccgcaagaggcggtcagtgttggcaagagaaaagctcgtcttccaaatgctctgaacaacctgaatgatgagctggaagaaatgtccagggcctcagaaatcaaacaccatccctctaggaaggaactgggaggaaggaaagggaggcagagagaaggtgtccacagatgcccttcccaggtggactcaaggagaagctgtggtccttcccctctcgtgaaccacaagattatgcagaactggctgattgtaggaatttctttctggaaacatgctcttcctctgtgacctcatagaagtccaagatctaagaggtccaagtacaaagaaatgacaaagggagcagaggagagcatttgatgctgttgactttttttttttgttttttatttttatttttttagatggagtctcattctgtctcccaggctggagtgcagtggtgtgatctcggctcactgcaacctccacctcccgggttcaagtgattctcctgcctcagcctcccaagtagctgggattacaggtgcctgccacttcgcctgactaacttttgtatttttggtagagacagagtttcaccatgttggccaggctgggcccttgacttttgcagtgaaataggaaataagggatgaaggtgaagaggtgagattgaggagtagaggagaaactaagatagcccatttggggaggaatcctgggaggacccaacacttgagacaaagagtttctttcacaagaaagacaaattccagcctaatcctctggaagtgtaatctgagaacatctgaagactcattctgagtgcaggagccaaggctagagcaagagcttcatctcactgctgctccatagcctgtgagtgctttgacatttggagttggacgcttctttgtgctgggggctgtgctaaacactgtaggctgtgcagcagcatccctggcctctgcccactggctgccagtagcatcctctccccaacccaaaatgtcctcagacactggcaagtatcccctgggggacaaaatcaccctttgttgaaaaccacgggtttagactcagagtctttctccttctttcctttctctcttttccttcctttttctttctttcctcctttcttccttccttagttccatcttcccttccttccttcctctttcttcctttctctttcttttttccttccttcctttctcccttcccttcccttcccatttccttttgcccctttcctttcttttttcctttctttcctttcctctttttatctgaaacaaggtctcactctattaccaagtctggagttcagtggtgtgatcatacctcactgcatcctcaagcttctgggctcaagcaatcctcccacttcagcctcctgaataggtgggactacaggtgtgcaccatcacgtccttttaattttgtagagacggagtctcaccatgtcacccaggctgatcttaaaccggcctcaagcgatcctcccatctcagacccccaagctgatgggattacaagcatgagccactgcacacagcctaaacccagagtttttttattgtgctcccagggcacaggtatgagacttacctaggtgtgattaaaaaaaaaaaatccatctacctgggcttctcctggacctactgaatcaaaatctccctggaggagacccagcaagctgcccttcaagcaggtgattcttcattaaacactctatgcctcagtttcctgaaatgggaaggataatgataacatctatctcaagggttggtatggaggttaagtgaggggattcacacattgagcacagtgtgctgaatgttagctattatcactcacattaaaggtggagaagcactggtttggagagatatgcattgagtgctcttgaagagagggaagaacaggaacccgggggcaggagagtgaacgctgctgtgataaccactctgctcaaatgccagccaagtactgtggctaatgatgagggggcacaatggggattatcccgccatcctagggctttcctccctgcagatcatcattgttcctgttgacttcatgctccagctgcctccccagctaaaacaaatactaacaactgatgatacaaggcaagaggggtgacagtggaaaaaaatgccaatctgtgtctcagttacaaataaacacaaacttagtggcttaaaacaacacacatttattatagttctggaggacagaggcccaacggacgtgaaaatcagggtgttgaaaccaacacaagtagtcccatagacagtttttttctttcttgataaacatagaaattgacctttctggtcttaactcttgaaacttaaagtttgttttatctgagttccttcctcaggagggaattccttgcctctcaaataagtatcaaagaactgaaactcaccagattacagcatccagacaatgagatgccagacccctcattcatcgggattgcttccttgcccgtcccaagttcctgttttgttacacattgttacatctcttccctgctgtataaacccttgattttagttggtcagggagatggatgtgagactgagttactggctccttggctgcaacacctgagtaaagcctccttccttagcaataattgttgtctcagtgtcggccttctgtgcagtgagcagcaggacctagacgaatcccctggtgttttggtaacagtgtcagcaggattgcctgtccttcttggggctctaaggaagaatgagtttccttgccttttctagcttctacattccttggccacctacattccttggcttatggccccttgcttcatgttcaaagccagcaatggtgaatggtgaaaggctggctctgcccctgcctggctctgcccctgcctggctttgtgcccctggacaagttatttaaattctctgagtttccactttaaaaaatttcccttgtgggcctggcacagtggctcatgcctgtaatcccagcactttgggaggccgaggcgggcagatcacgaggtcaggagatcaagaccatcctggctaacatggtgaaaccccgtctctactaaaaataaaaaaaattagccgggcgtggtggcgggcgcctgtagtcccagctactcgggaggctgaggcaggagaatggcgtgaacccgggaggcggagcttgtagtgagccaagatcgcaccactgcactccaggctgggtgacagagcaagactgtctcaaaaaaaaaaaaaaatttcccttgtaaagtgggtctattaatccttagcttgtaatatttgttcatttcataatagctagttgtgtggctggtaagtgagttatgtaactttcccaatcctcagtcttcattacctgttaactggggataataatagagggtacccttggatgcagtgaggattgaatgacagatcgtatataaggctcttaatgtggtgcctggtacatcataaggacagtgaggacttggtgaatgtcagttatcacaatcactgtctctatcctcaccataatcactatcactatcataatcatcaccactatcaccattatctttaccatcaccatcaccactatcactatcaccaccatcactgtcattatcaccatcactagcacatcactgtcatcgtcaccattatcactatcaccattatcaccatcattactatccccaccatcaccatcaccatcatcacgatcactgtcatcatcaccatcaccaccatcattaccacccctttcatcatcaccatcaccactatcaccaccaccaccaccatcaacatcactatcatcatcattgccaccaccaccatcaccaccatcaacaaaagaaaaagcagccaaactcagaattccacatcagctggaactagggttggggaagcacagaggacattagcccatgggaattctttgccccaacttcacctccctcccagaactcccttggctgggaatatcccacctcatacaccatcccattctgtgccctcttggaagatgagaagcaccaaaggtcttgtgtcccacctgcaatgtccacaaatactaatattaggcttagagaagagaaatgagaagagtgatattaagataataaaagtaggccaggcgcggtggctcacgcctgtaatcccagcacttcgggaggccgaggtgggcagatcacgaggtcaggagattgaaaccatcctggctaacatggtgaaaccccacctctactaaaaaatacaaaaaattagccaggcgtggtggcagatgcctgtagtcccagctacttgggaggctgaggcaggagaatggtgtgaacccgggaggcggagcttgtagtgagccaagatcatgccactgcactccagcctgggtgacagagcgagactctgtctcaaaaaacaaaaaacaaaaaacttagctgggcatggtggtgcacgcctacagtcccagctacttgggaggctgaggcaggagaatcgcttgaacccaggaggtggagatcacgccactgcactccagcctggcaacaggcaacagagcgaaactccgtctcaaacaacaacaataataataataataataaaagtaaattaggccgggcgtgatggctcacacctgtaatcccagcactttggaaggccgaggtaggcggatcacttgaggtcaggagttcgagaccagcttggccaacgtggtgaaaccccacctttactaaaaatacaaaaattagccaggggtggtggcgcatgctgtaatcccagctactctggaggctgaggcacaagaatcacttaaacccgggaggcagagattgcagtgagctgagatcgagccactgcactccagcctgggcaacagagcaagactccttctcaaaaaaaaaaaaaaaaaaaaaaaagataaaaaaaaggaaatttaccaacatttcttgagccttttaaaacttttttaaggctccaataagatcattaagtcctttctggaataaggagaggtagtaataaacaaattctttgttgctttcaaatcagtttatgcgttactcaagaaaagcagttaaaataactttacattaaatttcatttgatcaaccactttattcaaacaccttggcccagaatgactttggttattccaaaaagcaaactccgtctaaggcaaagttttatcacattaaggatattcacaagactttgccacagattgggactgcagttcccaggtgggacttccagaaagattgcatttgaattacgtgtgtgttatttccagggtgagactttgaaagagatgacacaagagttccggcaaattatttaacaaattgtaatgtcattttacattactcagtgtcctctccccaacacttcaaagtgaccttcaatgaatcaccaaaccatgctgtcatatttcttccaatgacaagcagaagggctccgattgctttctaaggccctttgggaccatatgagagaataaagtatatacttcctaattcaaagcaaatcattagggctgtggaattaaaattgtggaaattgataaacctataataacaacaattgcccggttaaaattgcataaacaacaaatctttttcggcacttctgtaggttcattctgttactcaaggtccatttgttctgaaatatcccccatccctgcaatctcagaatgagttcatgaaaacagacaattataaatctatcctgagctatgattcatgcatcttaaccgactccctaattcttccaatttacaaaccaattcagaagtcagtcaagggcccaggtcacgcaaggatggttagaggagcagatggagctgcttaaaaccatgtgcttggcggggttaaaatgatgagaatccagaggaaaataaattgggcctgtctaaagtaatatttcagtttttaaaaactgcttagcctgaaaatcatgtgcctcatttaattccctgcaggctggaaatttgacaggagagataaattgcaccaggaacattattttcattcagaaaggtaagcccaagaaatagggtgggatatatcctcatctgaatgagggtggtctgcggaggggggacgcagggaagagcagccaggggaaaaacaggatgtgtgcaggcgtgaacggctccagttcaatgtgaagtcagagggagagtcagatcatggcagaagaaggaaggaagcaaatctggaagcattcatgtcggactgaaaatccacaccagaagggagatgtggctctaaacagggatctcaagcacaaaggcaaagcatcagtactggaaatccttaggggatttaaaaaaagattaaaatgcatactctgttcagatttccttgtttttccgccaatgttctttttccattccaggatcccatcgaggacagtgcatgacattcagtccttgtgtcttcttagactcttctacactgtgacagtttctcaggtgcagtagcatgatctcagctcactgcaacctccgcctcctgggttcaagcgattctcctgcctcagcctcccgagtagggggcagtacaggcatgcaccaccacgcctggctaattttgtatttttagtggagacggggtttctccatgttggtcaggctggtcttgaactcctgaactcaggtgatctgcccacctcagcctcccaaagtgctgggattacaggcatgagcccagcctgcccttgacagttttaaggggtactgcacaggtattttgtagtggaataccctttaattttgagtttttctgatggtgagacaagttgtgagtttggagagaagactgcagaggtaagtcaccattctcatcactttcttcttttttttctttttttttgagatggaatctcatattgtcactcaggctggagtgcagtggcatgatctcagctcactgcaacctccgcctcctgggttcaagcgattctcctgccttagcctcccgagtagctgggactacaggtgtgtgccaccatgcctggctagtttttgtatttttagtagagacaaggtttcgccatgttggtgaagctggtctcaaacccctgacctcaggtaatccacccgcctcagcctcccaaagtgctgggaatacaggtgtgagccatggtgcccggccaccattctcatcacttcacatccgtggtacatcccatcaagatgagttggcactgttgatgctgaccttgagcccctggctgagggagtgtctgccaggtttctccattgtaaagtttctcctttcacttcctctttggaaggaagtcactatacacagcccacacttatagggtagggagttatgagtgcttccttgagagtggagtatggtgttatttttataattaaagaaaaagatgcctgcaatggaagatgaagaggatcacctgctggtggagcaaaaatccagaacctcgtgtgtgtctcagctagaactggtggtttgggaagggtcgactgcccagcagtgcagcgggagatgcaaaacctgagggttcaagtccaaaggttgacctggctttaaaagccaatgatgtcaaaaaaacaaaaccaaaaacactgagcacaaaagctaggcaatggtgcagccagttgggatacttttcataggcactgatttttactctctctggaattcctttcaaagacacagggtctgctggtggatggtcgctcctctgcagggactggggcacatggcatggcctcctatgtcatttgggggctctttgtttattcaacatgcccgccacacaccaggcaatattctaggagctaggcatgcagaaatgaaacatccatcctcctgatgaagacagacagcaagccaaaagataaacaaacaacatcatttaggtggacagggctaggaagagagtaaaatgccattacgggggtagacagtgattgatcccggggactcctccagatagcggggtcacagaagacctctatgagaaagtggcatttgagctgccactgaatgaccagcagaagctggcctgggaagacggagggggaagaatgcttcagatagaggatccacgagtgcagaagctgtgagaggtgacaacacagtgagatcctgtctctaaaagaaagagaaaaggcagatgtgggtggagcaaaatgaggaagggaaggggtgttccaagatggagagacaggaagtggccccatgatgcccggcctataggccacactgaaaagtttggattttagtcctagtggtcaacctattgatggtatttcaattttaattttaaaaaatacaatcaggctgggcgtggtggcaggtaatcccagctacttgggaggctgaggcagtgagccaagatctcaccattgcactccagactgggcaacaagagggaaactctgtctgaaaaaaagaaagaaagaaaaaaaaaagtcactgtgtttcccatgagagtgtgatctactaagggagcaagtatagaaataggaagacctgctactgcctcaaagaattgttaaaggatcgaacgcctactaatgtgtgcaaagcctgggacatagcaggaatgcagtaaatgcaataaaagaaaatagctgcagtaagtgctatcagtaaatgcactactggactgggcgtggtggctcacgcctgtaatcccaacactttgggaggccgaggcgggaagattacttgagctcaggagttcgagaccagcctgggcaatatatcaagacctcatctctacaaaaaatacaaaaaccaaaatagccgggcatggtgggtgtgcctctggtcccagctactcgggaggctgaggtgggaggattgctcaagcccagaaggcggtggaggttacagtgagctgagatcatgccactgcaccacagcctgggtgacagagcaagaccctgtctcaaataaataaataaaaataaaaaataagaataaaaatcaataaatacactactgcacttatgcagatgaacttcacttcttccgacttagccacacacaactttccagcatcacagatctttgcagagggtgggacagccgggaaggtgctgttcgcacagaattggctgaatgaccaggtgtttgatggatgaatcccaggtagccagggcgtctctgggcacacgcacccaggatcacacctggacaagaaagtggggtctaaagtagcagtccgaggctgggtgcagtggctcatgcctgtaatcccaaaactatgggaggttgaggcaggagggttgcttgagaccaagagttgaagatcagcctgggcaacatagcaagaccccatctctacaaaattttgaaaaattagctaggtgtggtggcatatgccagtggtcccagctactcagaaggttgaggtaggaggatcacttgagcctaggagttaaaggctgcagtgggccatgatcacgccactgcactctattttgagtgacagagatcctgtctccaaaaaatacatatgccagtgcaggcctggtatgtgtcctgagagttccctgcctggcatctcttgaagtgggcaccagtaaccagaagctgaagtcctggtttggcaaaggatggaggaaaaagatattggatctggagggctgggtgcaggtggcttacacctgtaatcccagcacttggggaggccgaggtgggcagatcatgtggtcaggagatcgagaggatcctggctcatacggtgaaactccgtctctacaaaaaatacaaaaaattagccggatgagggcgggcgcctgtagtcccagctactcggaaggctgaggcaggagaatggcgtgaacccgggaggcgtagcttgcagccagccgagatcgagccactgcactgcagcctgggcgacagagcaagactccatctcaaaaaaaaagatattggatctggaatggatcgctgaaaataaaagaaaactggggtgaaaaagaagtgtacatgggataaactggaggtaatgagttatgtttgggggaagatagaaaaagttagactctgtggcgtgggaggagcagagtaaatgtcaacagtcccctcgagcctggaaaactccaccatgagtcatggaggacccacgtcagaaaatagctattttgagcccagctagaaagtttggctctgtctgcttttcctgagagtggtgagtggttgacccaggctgtaagctcttcaggtcattgcttccccaaacaaaatttcaatcaagcgagtgccatgaccctgcacagaagtccagaactaaacctcgatgtgggactgggcttgccaaaccagaaggtctgttctaagagaaagaagctggaacctgcgaggggaattttgccaatgggaggaacagcaatttctccaaaaagagggggtaggaccagcaatttcccgttcctggaaggtcccctatacattttgttcagagcatttagattctaaatgtcacagtgtgatgtcctcatgtgcaatggacatttgttgatttgcctcccagtatccattcacctttcttaggtaataggacctgtttcctttggggaaccaactggcaccaccgctcccaggacttgcaaatttaatggggcttaccctacccaggtgtggcctaaggtgctcactgtgttcccttcccgttcagattcagatagatataggatcagatacacaccagaagtagtcagacccagaactttgctgtgaacccccctgggggaaaagaaaccctgaatcctaagaacaaagccctcatggaggggataaaagctgagggataaacagatagactttggactcctgcctcaaccacccctagagtgtagaaaccccggttagtacattcctttttttttttttttttttttgcatatgcagtttgggttgagttttctgttgcacaaaaccaagaaagtcacacaaatactatatatctttgttttttttttttttgagacggagtctcgctctgttgcccaggctggagtgcagtggcgcgatctcggttcacgccattctcctgcctcagcctccggggtacctgggaccacagacacccaccaccacgcccagctaatttttgtattttttttttttttttagtagagatggggtttcactgtgttagccaggacggtcttgctctcctgacctcgtgatccacccgcctcggcctcccaaagtgctgggattacagatgtgggccaccgcgcccagccccacaaatactatgtatcttttaagagaaacgcatgatgagaagcagcagggggtcaacatgcatctggggtgttagaacccaagaggcagtagacagtcatcttgtacctcccctgcctgctgtcagaatgctaatgcactgtctcctaaagcagggtatgaaaaatatggccccaaggccatctccagcccatcacttctttttgtgcagcctgtgagacaagaatggcttttacatttgtgaatatttggacggggggcaaggggtcagcgtggaatcaaatgaaaactgcaaaaaattcagatttcagcatctataaataaagctttattagaacacatccatgcccatttgtttaggtactgttgatgactgcttttgtgttacagcagggctgagtagctgggacagagaccatactgtcagaagcgtttgaaccagaacaacaccatcttgaataggggctgggtaaaatgaggcggagacctattgggctgcattcccaggaggttaggcattctaagtcacaggatgagctaggaggacggcacaagatacaggtcacaaagacctgaccgataaaacaggttgcggtaaagaagctggccaaaagccaccaaaaccaagagggcaacgcacatgatctctggtcatcctcactactcattccacactaattataatgcattaccatgctaaaagacccgcccaccagcgccaggactgtttacaaatgccatggcaatgtcagttaccttatatagtcttaaaagtggaggaaccctcagctgtgggaattgcccacctctttcccagaaaactcatgaataattcgccccttgtttagcatataatttagaaaaaactgttaagcattatgagttgagcagtccaagctgctgttctggctgtggagtagccattcttttatttctttactttcttaataacttaagaaacttaataaataaacttgctttcattttactctatggattcgccttgagttctttcttgcacaatatctaagaatcctctcttggggtctggatcgggacccctttcctttaacaatatggccctcaaagacaaaaatatttaccatgagtcctttaagcaaaggttcacagactcctgccctaaaagatactgtaattctaagacatccaggaaagagacattctgtaacttgtcttttataaactaagatattaaaggctttaaatttcaatcttatgctggcaaacttgataaaacaattggtttttcctgctaggtaagatggcaagaattgctattattttatataaggctgtttagaagaaacccttactaaagcttttaaggttataaatcaaaagtaccgtctagaattcaaataatatgaattcaaattatagaattcaagggcaatagcaatgatatattcaatcttagtaatggttattcagccctattttcccattatcatagaaattcccttttaaacatcttctatattttgaataatctgaaaaacaatctgtcataatgaaatgaactttacagtaataataatagctatttgttaaatctttactatttgccaggcagagttctgagcattttacttacattaacacatttaatggctccaaccatgctgtcaggtaagtaatattattatacccattttgtagatgacaaaacgaaggcacagagacaggttaagtaatttgcctaagatcacacagcaaatattggggccaggattcaaaccccagtaatctagacccagaaactgaactatgctaggggttagaccatctcagatttatttaaaagaggtggaaatgacaataatatttcactatagtttagaatttaattgatatcactgtgtaacatacacctttttttccctcagaagtatttctggaccactaacacgatcatgttgatacaatggaactcacatcccctctccatatttgattggatcaggtgtcaacatctggcccaagctggaccaataggctccttccctgagcttttggtgctgagattaagattccagtctcaacctgacttctgtcactctcccatgagatagaagaatagaggagacatggagaaaaacagtcaagaggtagaggtggtgggagggacctccttgattcacaatggactctatccccttcctgaattccagtggaaccatggccctgtgttctgtgagacaccctagaatccttcaacaatatccacttttggctgaacccagtgggttttggtcacctagaaccaaaagaatcctcaaacgtaacccgattaagagcaaaacaacctggctttttttttttttttttgagatggagtcttgctctgttgcccaggctggagtatagtggcacgatctcggctcactgcagtctctgcctcccaagttccagcgattgtgccaccacacctggctaatttttgtatttttagtagagacaaggtttcaccatgttggccagcctggtcttgaactcctgacctcaggtgatccacccacctcagtctcccaaagtgctaggattacaggcatgagccactacacctggccaacctgccattttatatattctctgagtcatcagcatgggcctctcaaatgatggacttgctggatttctgtttatttcctttgctgtgcactaagtaggtcagctcccaagaatgactagtttggagatggagggactagtggaatatgcttagaatggtgcctaagccaagctgggaaccaacaaattggttttgggctctactttagtttttcttgttgttgtttgtttgctttttttttttggcctgggggggaaaaaacccacaaatgtctttccccagtttcctccagtaacacagatggaaatagtagtttatacttgggatggtgctcggggaaatagtgtctcagaaccaattactgaaatgaccagaatggatataaaatgtggctgcataatttcctaagtcccatttctcagggtaaaaatggttcagaccatccaaatgcttctccgaagaaattacacaagcgagatggaaaaagaaagtattggtttctcagcgctggtaataattaggacttgaatgagtggtgataaacccatttacagacaggaagtgtgaaggcctgaatggccaggagatttgctaagtgatgacaagatcaagatcaggcctctggcctctgagcccagctccctaagcctagtgaactttgaatgacacctgattttttgccccatccagcacccattttctgaatgcaatttggaggaatgaacatacgacccagaacctggccaatcagaatattctaccgccacctcttcccctctcccccaccatggtaatcagttcagccatgggcaaattatccaagttgaggcaataatactcagtcccatgacttccattgaaacttctaatgaaacgatctctctctgttgggattgctacctgatggctaatgtaagcttagagccactgggattgccatatggaaagcatctgcctgagagtgaagccaacacaagtagatgcagaaaaactgagtcctactgatggcatttgatcccttggatccagccacgctggatatgggatatgggaaaccttgaagtacagtgactactgtggataaggggtcaatgggtaagtggtttccttgtgggatgatgaaaatgtttggcatctagaggtgatggttgcacaagactgtgaatgtacataaagccactgaagggtacactttaaaatgatgaatgctatgttatgtgaatttcgccttctttttttaaaaaaggggaaagaggccaggtgcggtggctcacgcctgtaatctcagcactttgggaggccaaggtgggcagattacctgaggtcaggagctcgagaccagcctggccaatatggtgaaaccctgtctctactaaaaatacaaaaattagccgggtgtggcggtgtgtgcctgtagtcccagctatttgggaggctaaggcaggagaatcgcttgaacccaggaggcgaagtttgcagtgagttgagattgcaccactgcactcctgcctgggcagcagagcgagactctttctcaaaaaaaaaaaagaggttgggggaagagcataattttaaccacgcagatatcagagatttcacaaaaggagtgtcactgaagctagatatggtggtcaagaggcaggagaagggggagatgctttctaggcctaataacaaggtgctaagcccttttgatgtggtctgaacatctgttccctccaaatctcatgttaaaatttgatccccagtgttggaagtggggcctgttgagaggtgtttggatgatgggagcagatccctcgtgaatggcttcatgccatgtttgcaggattgagtgagttctcacccttaattcccaagagatctggctgttaaagaagctggcatcttcctcttttctcttcctctctcttgacatgtgatgtctgttccccttcaccttccacagtgattgtaagattcttgggcccctcaccagaatcagatgctggcaccatgtttcttgtataacctgcagaactatgagccaaataaacctcttttatttataaattacccaacctccggtattcctttacagcaacatgaaatggactaagatacctctacctacagtaattacatcgttaatcctcacagcaacccttgaggtagtaaatattactttagccttgttttataggtaagtatgcaagggccagaaaggggacataacttgcccaagtttacatagttgtagatcagcagagagctgggactcaaacatagatttttctggccaggcacggtggctcatgcctgtaatcctagcactttgggaggccgaggcgagtggatcacctgaggtcaagagttcgagaccagcctggccaacatggggaaacctcatctctaataaaactacaaaaattggccaggtatggtggtggacatctataaccccagctacttgagaggctgaggcaggagaatcacttgaacccaggaggcagaggttgcagtgagctgagatcatgccattgcactccagcctgggcttcagagagaaactctgtctcaaaaataaataaataaataaaaataggtttttacaactctcaaccactccgttcaagtgcctcctagtagagggaagagcatagaaacacagaacatttctttagaagaatgtatcattccatgttcttcctagaggaataatcggagtttagcccactaagataactcacaacagcaacctttataacagtggaaaaattggaaacatacaatgtttggccatatggactagttaagttattgaagaatatgtgatgatttgggactaggatcataatttagagctgagtgaaaaaggcaggatatgggaaagtaaaatagttggatattagctacacaggaaaaatattaaaaggttactagaaaaacacgcatcaggatgttggttgactttggcgggtagaattgtgggtgatttttttctatgtgttttacgcgcgtgtgtgtgtgtatagactcagtttccatatctgtaaaatgggtataataacagatctcccccactgaatggtcagaaacactaagtgagacaacgcatgtaaagctt

SEQ ID NO: 233 - DNA, 835 bp, Homo sapiens
  misc_feature (1)...(835): n=a,t,g or c
nnnnccccncccnnnnccnnntcttctagtttgncgattttgtcttggcttggngatggcgcggcgtncgtgttcgagttctctgcaggtcactagtttcccggtagttcagctgcacatgaatagaacagcaatgagagccagtcagntggactttgaaaattcaatgaatcaagtgaaactcttgaaaaaggatccaggaaacgaagtgaagctaaaactctacgcgctatataagcaggccactgaaggaccttgtaacatgcccaaaccaggtgtntttgacttgatcaacaaggccaaatgggacgcatggaatgcccttggcagcctgcccaaggaagctgccaggcagaactatgtggatttggtgtccagtttgagtccttcattggaatcctctagtcaggtggagcctggaacagacaggaaatcaactgggtttggaaactctggtggtgacctccgaagatggcatcacaaagatcatgttcacccggcccaannangaaaattgccataacactgagtngatccagtttggcttacatgactgcaannnnnnnnnnnnnnttnnccacnttnnntccanannnnnnnnnnnnnccncnntnncnntnccaannnnncccccncncccnntnncnccccnccnnnnnnccncncncccnnnnccnncncccncnnnnnnnnnncnncncncccnnnnncnnccncnnnnnnnncncnccncccnnnnnnnnnccnncccnncnncccnncccncncnncnccnncnnnnnnncnnnnncnnccncnnncnnnccnncccncccccnnnnncnccncnccnccc

SEQ ID NO: 234 - DNA, 1549 bp, Homo sapiens
cttcagccgtgtatgcaaatggataaccggttgcctcccaaaaaagttccaggtttctgttcctttcgctatggattgtctttccttgtgcactgttgtaatgttataataacagcacagcgtgcgtgcctgaacctcacaatggtagtcatggtgaatagcacagatccacatggtttgcccaacacctccacaaagaagctcctggataatataaagaaccctatgtataattggagcccagatatccagggaatcatcttgagttccacctcctatggtgtcatcatcatccaagttcctgttggatacttctctggaatatattctacaaagaaaatgattggctttgcattatgcctcagctctgtgttaagcctgctcatcccaccagcagctggaattggagtagcttgggtcgttgtatgtcgagcagttcagggagcagcccaggggatagttgcaacagcccagtttgaaatatatgtcaaatgggctcctcccctggaacgaggccgacttacttctatgagtacatcagggtttttgctgggaccctttattgtcctacttgtgactggagttatctgtgaatctctgggctggcccatggtcttctatatttttggtgcttgtggctgtgccgtatgtcttctctggttcgttctgttttatgatgaccccaaagaccacccatgtataagcatcagtgaaaaggaatacatcacatcctccctggtccagcaggtcagttcaagtagacaatctctgcctatcaaggctatacttaagtcgcttccagtctgggctatttccattggtagttttacgtttttctggtcacataacatcatgacactatacactccaatgtttatcaactccatgcttcatgttaatataaaagagaatgggttcttgtcttcccttccctatttgtttgcctggatctgtggtaacctagcaggtcagttatcagacttcttcctgaccaggaatattctcagcgtaattgctgtccggaaactcttcacagcagcaggatttctccttcctgcaatctttggtgtctgcctgccttacctgagttccaccttctacagcattgtcattttcctaatacttgctggtgcaacaggcagcttttgcttgggtggagtgtttataaatggcttggatattgctcccagatattttggatttattaaagcatgttcaactttaactggaatgataggaggactaattgcttccactttgactggattgatccttaagcaggatccggaatccgcctggtttaaaaccttcatcctgatggcagccattaatgtgactggcctaattttctaccttatagttgctacagcagaaattcaggactgggctaaagaaaaacaacacacacgtctctgaagtgtgaaacagagcacttgcagagcctgggacaacctccttattgaagggaagagggaccagcacatgaggctgaggctgaggggcagtcaccagcaccaggaagaaggtggtaggaggagtcctaggggct

SEQ ID NO: 235 - DNA, 1890 bp, Homo sapiens; identical to SEQ ID NO: 9

SEQ ID NO: 236 - DNA, 2148 bp, Homo sapiens; identical to SEQ ID NO: 10

SEQ ID NO: 237 - DNA, 1496 bp, Homo sapiens
cgcactccctgctgggtgagcagcactgtaaagatgaagctggctaactggtactggctgagctcagctgttcttgccacttacggttttttggttgtggcaaacaatgaaacagaggaaattaaagatgaaagagcaaaggatgtctgcccagtgagactagaaagcagagggaaatgcgaagaggcaggggagtgcccctaccaggtaagcctgccccccttgactattcagctcccgaagcaattcagcaggatcgaggaggtgttcaaagaagtccaaaacctcaaggaaatcgtaaatagtctaaagaaatcttgccaagactgcaagctgcaggctgatgacaacggagacccaggcagaaacggactgttgttacccagtacaggagccccgggagaggttggtgataacagagttagagaattagagagtgaggttaacaagctgtcctctgagctaaagaatgccaaagaggagatcaatgtacttcatggtcgcctggagaagctgaatcttgtaaatatgaacaacatagaaaattatgttgacagcaaagtggcaaatctaacatttgttgtcaatagtttggatggcaaatgttcaaagtgtcccagccaagaacaaatacagtcacgtccagttcaacatctaatatataaagattgctctgactactacgcaataggcaaaagaagcagtgagacctacagagttacacctgatcccaaaaatagtagctttgaagtttactgtgacatggagaccatggggggaggctggacagtgctgcaggcacgtctcgatgggagcaccaacttcaccagaacatggcaagactacaaagcaggctttggaaacctcagaagggaattttggctggggaacgataaaattcatcttctgaccaagagtaaggaaatgattctgagaatagatcttgaagactttaatggtgtcgaactatatgccttgtatgatcagttttatgtggctaatgagtttctcaaatatcgtttacacgttggtaactataatggcacagctggagatgcattacgtttcaacaaacattacaaccacgatctgaagtttttcaccactccagataaagacaatgatcgatatccttctgggaactgtgggctgtactacagttcaggctggtggtttgatgcatgtctttctgcaaacttaaatggcaaatattatcaccaaaaatacagaggtgtccgtaatgggattttctggggtacctggcctggtgtaagtgaggcacaccctggtggctacaagtcctccttcaaagaggctaagatgatgatcagacccaagcactttaagccataaatcactctgttcattcctccaggtattcgttatctaatagggcaattaattccttcagcactttagaatatgccttgtttcatatttttcatagctaaaaaatgtttgacatcctttgagatattttattactaaaatctgcc

SEQ ID NO: 238 - DNA, 391 bp, Homo sapiens; identical to SEQ ID NO: 11

SEQ ID NO: 239 - DNA, 305 bp, Homo sapiens
gctgtgtttccactttattaaatcatcacagtaaatcagaattaaagagtaaaagaggttaactggagagtcgggtggctgccatcagtggagatgtgtgctttctcggtgtggctgcctgggccgcggtgtgtcctggtgcacacacgtctgcaaggtgttcccaccacctaggaaggaacctagatgtggagcattaggaaaattaaataacaagagacagcaaaataagaatcaaatgacacgctataacttaatttaccatatttatcaaattttttccttatttacatgtactaaacatt

SEQ ID NO: 240 - DNA, 244 bp, Homo sapiens
gagaacttaacagatactttattgctcacctttcacacaaagcacacctccagccattttctttcacagcttgacaatgtttacatgtacaaaaacccagcaagaagcatcatgtcatgtagatttcagtaagggagaatgtaaaacatcaactcagccaggcttttgttttctgcagcaataataaagggcctcctgcacttagcaaaaatctgtcttaactttgtagtgcatttcttccatt

SEQ ID NO: 241 - DNA, 479 bp, Homo sapiens
  misc_feature (1)...(479): n=a,t,g or c
atcatcataaaaaatatttattataaaaaattatcacatttctctgtacatagcataaagacaaaaacacaatgtatacattaataaattaagtgggcctgagtattcagtatccatctactagaatcctaaagctcttccccagatttcacaaaggccaatgtagattatttctattttatcaaagttcatttgcacagttggtgtaattgagatactaacatttcttttttctagtgttttaaagatagttcacagtatttgagttaattaattaatcaactgatttaaatctttggtaaatacaagtatttacatgtaaaaatgtttagctcaaatttcagtaaaaaactggaaatgaccaataacctactgccaactgttttggtataatccagaaatgcatgagccggactcccaccattaagaaatggcactgtcnaggacctcngatgataaaactggaatccncaaaaaat

SEQ ID NO: 242 - DNA, 276 bp, Homo sapiens
gtttgtttttttcctttttcccaaagccaattcattttacaacgaaggacaactgagcagtcggttaagttatgcctttgttttcagagtggagtttatagcctcactagaagatttacaatccataaggccataagatgatgctgtgcttagatgaacaattttatagcgtgaagatactaagacatcccccaagagagtttgggtgctagatcagttatttattggtaattttttttcccttacaaaaccaaacaaaaaattctgctatggttc

SEQ ID NO: 243 - DNA, 339 bp, Homo sapiens
tttttcagaatattcaactttattttccattgacaaacacgacataaataacacacatttattaaatacacagactagccatgacttgaatgccagcaaaagtctaacgtacttttcatacgctcttttattttttgtctccacagtattgaagaccagcctttaaaacatactagaagatatatttaaatacactgacgataactacccataaaactttacatagaggtgataaaagagacttttccatttaatcaagtatatagagatggatgctgaggaggagaggtgaagaacactatgcttttgatactgatctttacaatatggattaaagtg

SEQ ID NO: 244 - DNA, 448 bp, Homo sapiens
tttttttttttgagatcacaggctttattcctacaaccacagggcttgagctgcactggggcaagaaaacagagtttcatctgagaatgtctcttatgggctgggttctgttcaggggagggtgggaacagaggacaaggaagacaagctcctctggccctaggaacaaaacacatttactccttcaaagaagcagatgatctgaataccctctggagactgaatctgcccatacagcccctggagccaatgggagacagtactggcatctggcacaaaagggaattcagacccagaacagaagcagcaaaatattttaaaaatagtaaattgttcctggactcacaaatcattgtttttaagggcaagtgcatgcccaatataagtactggggcttcctaagagagctgacataggattacacagctgcctccctgcttcagtggag

SEQ ID NO: 245 - DNA, 315 bp, Homo sapiens
ttttttttttttttgcaacagagcagaaaggatgctttatttgcaaaagagtggtgaacatctaaaaagttgacattgtatatgattacaaagtaaagagtactcttgtgagagaagttacatgttcattgttaaggaaattatatgtaaatcacaaagatcatggtctgtgaataatgtgccatatctcacaaaatatggtcattggaatcttattaaaattatctacaggtgacttcagtttccattctccaccctctgccttaagatacgaagccttgacatgaccacatcccagtcagcataagctccttc

SEQ ID NO: 246 - DNA, 261 bp, Homo sapiens
ggaggaactgatgaattcattttaatcacagaaatttgcctgggcttgagcaaactgtggggactcaatagatttggaggcctcctctcccttctgagaggcctgcctgcttcctgccctgatgaatccctaatttcagtacaaactgaggaacttgaaaaacatctgtgcactgggaccgcccctcacaggagggctgaaagagcacagctgagtcagcggcacattcagcaggcgttcagtggggaagcaggagacaga

SEQ ID NO: 247 - DNA, 295 bp, Homo sapiens
tattctttcaaaatatattttattagcggcacatggaatgtcaagttaagcaaattctttccagagagaaggtgagcctgacagactaaaacgttgagcacggatgatacagcagaaataacatttccagtgtaatgagagataaagaggaatactgcccaccgaggaaatgactttcttcaccatgctgaccacactgcacagcgcccgatccggctggtgaggatggggaggtgggaagaatctcaaagcactggacagggtgaggactcaggaagtcacggggtcagcccta

SEQ ID NO: 248 - DNA, 379 bp, Homo sapiens
gggaacgtgaattttaatgagggggcagaccgaggaggtggtggctgcccggagatcagggccaggctgtgctagatggcgcctggaaggggggtcacccaagtctccctgctgtcatttcaggaggccgacccaagtctccctgctgtcatttcaggaggccgaattttttcccaatcccagagaaggtgtcagaggcctggttagcagtcttgtcgatggtttcctgggtggtcttggccagctggtccatggctttctgccccgcctctgtggcctggtccaccacttgctgagctgccgctccggccgctgacacggcttcctgggcggtcccctccacctgttgcttcaggtcctgcaagcacttgcttgccat

SEQ ID NO: 249 - DNA, 546 bp, Homo sapiens
gcggccgcccagcccacgtacaggcccgcgcccatctcgcgcttctgcgctcgggcaccacggggttgtagaagtcccggataatggtgttggccgaccaggacaccggcacgagggtgagcagggcggcgagaaggaacagcacgcctgccacgatggtgatcttggccttggcgtgtcgtcctgcacgcagttggtgcactgggcgcccaccagcgcactagcagcccgaagcggtccagcaggatggccaccacgatgagggcgcgggccgctgcaaggtcctgtggcagtgcagcagcgagtcgtacaccttgcactgcatctggccggtgctctgcacacgcagttcatccacaggccctcccagatgttctgccacgtgatgatgttgctgccgatgaaggccgacacgcgccacatgggcaacgcgcacacacgatggtgcccagccagcccagcacggccagcgcggtgcccgtgatctccaggcccatggacatggctgccgcggcaaggcccgctccaccgggtggctccgggtgc

SEQ ID NO: 250 - DNA, 169 bp, Homo sapiens
cagggagaggaaattctgttaattccacgtttattaatcacacagctctctgcagactagacactaaaacacacaattgtcaaaaactagaaaaatgagttatgtccacgttttaaaagcaaaactttataaatttcttaccacactcattcccaagttttatcccaca

SEQ ID NO: 251 - DNA, 430 bp, Homo sapiens
atattaaaagactttattcacaatagagaaattttacaaatataatttttaaaaattatgtgtcaatctattgtttcccataacattggagatttatatataaagttgaaaatgacagaatggatttatgtaaaaataaaaaacaatcaatgtacacaatgtgtagctcatatgaaaacctcatgacaagtcattgagttctgtaaactgccatacaacttacatgtgtaatattaattgcacaaagtatatcaagacatattgaagaaacacaaaattaagtgctattttaacggttcatctttcagtatgtgaatacgtatacaaatttaactgcacagttttgttgaaaataagtttcaacaataagacttcagttgttaaaattaacccaaaatataactttaattaaattacatcactacaatat

SEQ ID NO: 252 - DNA, 464 bp, Homo sapiens
tttattggactgtaggtttttattaaaacaaacatttctcatagctctaagcaaagcattagaattcatcaagcggactcacatcttttctctgcacagagagggctgaaaagggagagaaagtcccttatgtatgtctagatttggtaaagcgaaggatttcagcgaatgagtcactgaggctatacacgtttgcaaattgtaaggcactggcgggcagagagcacagataaaggacttctggggtcccccatcctgtccagcaacctcccagctcacaccttagcttctaccaagaagggtgaacacagcatccctgctatcttcactcagaccccagaagacacaggaaaccgcacagctccactcccaccataacttattaggagataagtcacattttatcaacttgccatcgcgcctcctatagattatacttcggtaaacccaatctgtataaattc

SEQ ID NO: 253 - DNA, 385 bp, Homo sapiens
tttttttttttttttttttttaagtttgtctggtttatttgcaggctgttagagatgatatcccagtccacgcacactcccatgcacacgcacacacatacttcatccacctgaatttgcccgacaaaccctcctctgagtcatagggacaaagccatacttggcagtcctcacgttactggttacattagatttggtctttcagaaagaagatggttgaagtcccaagaagctgagcccttagccagagaagtaagagtcctagaaccaagagccacaacctgaaaagatgcagattgcccccgccttccttccagggacaactcttgagaccctctcctcccaggagttgagtctcaagaaatgaagggactgatggggtttc

SEQ ID NO: 254 - DNA, 301 bp, Homo sapiens
gcttcagatcatgtttattgkggggccagggggtagggatcctcgggtgagagggctggctggccggggtaagttgctctggacgtgctggcggggagcagtcctggtggcgggatggcgggggcacttctgggtcccagggtgcacgggatccgggcagtgctcagggtggcaagaggcggcgtgcaggcacctggggcgccggggtctctaggcgtttcacacgsagcagcgcccccagcacgccctcagggggcagctcagagcccacatcgtggtcggcggcacggcggaggcggcg

SEQ ID NO: 255 - DNA, 173 bp, Homo sapiens
  misc_feature (1)...(173): n=a,t,g or c
gggtaaggaaatagtttatnactgggtggcgggtgggggtaggggtggaaaacacagaaaaggagaggtccataaatatcccttaaggattccattcatgaagatgttggcaagggcaggggagtggtggggcggttatagcaaaaaaggtcaggcctcattgctgaatccag

SEQ ID NO: 256 - DNA, 305 bp, Homo sapiens; identical to SEQ ID NO: 17
  misc_feature (1)...(305): n=a,t,g or c

SEQ ID NO: 257 - DNA, 287 bp, Homo sapiens; identical to SEQ ID NO: 19

SEQ ID NO: 258 - DNA, 439 bp, Homo sapiens; identical to SEQ ID NO: 22
  misc_feature (1)...(439): n=a,t,g or c

SEQ ID NO: 259 - DNA, 367 bp, Homo sapiens
  misc_feature (1)...(367): n=a,t,g or c
ttggntatgggttctgtttattaaaatcctattgctcctactggccctgtgtcccgcctccattcctgtggttggggggaaggaagggcaacccgacccctttccactggccccatcagccctcagtggtcacgggcagtagccgntcctccagcagggttatggcaagcatgaggcagccccccagcagcagccccagcccctgcaggagcacatggggcntaggcaggggntccggagacggaagcagggntgggtagcatntccacaagggccacatagaggaagaccccagcantgaccccaaacacccagggagtgagggggacagggcccagggntgagccccacccgaggatttgcancc

SEQ ID NO: 260 - DNA, 409 bp, Homo sapiens; identical to SEQ ID NO: 24
  misc_feature (1)...(409): n=a,t,g or c

SEQ ID NO: 261 - DNA, 414 bp, Homo sapiens; identical to SEQ ID NO: 25
  misc_feature (1)...(414): n=a,t,g or c

SEQ ID NO: 262 - DNA, 267 bp, Homo sapiens
taagatttgattttcttttatttgtggcactaaaagacagatagctgtgatgaagagcaattggctggtagctcgtgcctcaccaagagtttagcaacgttaatcagtgaatgcagaacagcttccattctacctgaggcctagatctgagatcgctgtgaaacattaaagtgacctcaccatacttgttttctcactcagatacacattttatttcatcaacacatcttgatttctattacttttttcaatataacaaaatgtttt

SEQ ID NO: 263 - DNA, 301 bp, Homo sapiens; identical to SEQ ID NO: 29

SEQ ID NO: 264 - DNA, 434 bp, Homo sapiens
tttatttgttctttttattattatttttaagttcacctacagctgcagtacacacacaccgctttatttggctagctgctattcagaagacacttcctgaattcaggaaaaatttttttaaaaacctgagaacaattcctgtgacttcttagctttgatgaagtgcatttactttgacattgatatagcttgtaactacttttggaatttttttcccctaacactttgatctcattaagggtattacaccttttccaccagaaaatgcagaggtatcatctttcttggaaaccaattgaaagcgtcccattttaacaaaatgacataaaattacaaacatttacatgattaaattcaaagcctgatccatctggtggtaagaaatgttaacttattttaaaagatgtatttggcattattaaaatatagtaacg

SEQ ID NO: 265 - DNA, 544 bp, Homo sapiens; identical to SEQ ID NO: 33

SEQ ID NO: 266 - DNA, 512 bp, Homo sapiens; identical to SEQ ID NO: 36
  misc_feature (1)...(512): n=a,t,g or c

SEQ ID NO: 267 - DNA, 428 bp, Homo sapiens
  misc_feature (1)...(428): n=a,t,g or c
aatggtatttattctagcaaccacaacattgttacaaaagcacaattttaataggcttatctgctaagatgcttttataagcagctgtcacctatacagagttatgaatcatctttggtgctcaaggaacctgtagaagtaagagacatcatcatacagagaaatgtagttaagttaagttgaagcttggaaaagatcacatgaaaaaaatctagctcttgccttatctcttcctaagttaagcataaattagccgtctgcaatagccgcctgtaagacaaatgataacagaagacaatcacacatggtgaatcggtttccagtggagtttttcttctaaagagacagtaaacaggtcacaactcattccttgagaaaggattcctattaaatacccagaaacagctatcaaataaacagccaaagcn

SEQ ID NO: 268 - DNA, 228 bp, Homo sapiens
ttttttttttttttctcttcaaatatttaatcagtttggagacctctgcattccaatccaattgggtaaaaattctaaagaaagcaagattaaggggtcctcaaagaaaacactgggctaaaatggagaggagactgggtttgggaagacagaacatagcatgtgtctgaaggcctttcgaaggaattctacgacatattttttaaaaatactccaaatgaacaagac

SEQ ID NO: 269 - DNA, 513 bp, Homo sapiens; identical to SEQ ID NO: 40
  misc_feature (1)...(513): n=a,t,g or c

SEQ ID NO: 270 - DNA, 435 bp, Homo sapiens; identical to SEQ ID NO: 43
  misc_feature (1)...(435): n=a,t,g or c

SEQ ID NO: 271 - DNA, 453 bp, Homo sapiens; identical to SEQ ID NO: 44

SEQ ID NO: 272 - DNA, 359 bp, Homo sapiens
gaatggacaataagcttttattgcattgaaaggtcattgcagtgaaaggttggggattgcttgctgctacagctgaatggattctattctgaccaatacacacagaaagagatcacagactccctaccttagaagaagggaggtggtagatgaaatgaactgtatgaagagccactagcctggcccacacacagaagaaggactggcccgtcttcttgaagcccatgctctggtagagggccatagcagagagctggatggtgccggtgtccaggataacttcactgtagccctggtcccgggcaaacttggaggacagtccttgaccagggcttttgctatcccccgacgacaggggc

SEQ ID NO: 273 - DNA, 262 bp, Homo sapiens; identical to SEQ ID NO: 46

SEQ ID NO: 274 - DNA, 435 bp, Homo sapiens; identical to SEQ ID NO: 47
  misc_feature (1)...(435): n=a,t,g or c

SEQ ID NO: 275 - DNA, 317 bp, Homo sapiens; identical to SEQ ID NO: 52
  misc_feature (1)...(317): n=a,t,g or c

SEQ ID NO: 276 - DNA, 414 bp, Homo sapiens; identical to SEQ ID NO: 53
  misc_feature (1)...(414): n=a,t,g or c

SEQ ID NO: 277 - DNA, 348 bp, Homo sapiens
  misc_feature (1)...(348): n=a,t,g or c
aatcagagtaatanctttatttccaaattcacttttacagcaacagtcagtgtaaatcatttgttaaaacacacaatacactatatagacattcacagacagaaagctaagctaagatgatttcatgtccctccccccaccctcagaattaccgaagaaatcatgggacttgcaagtgccagaaatagtcctgctcaacatggcaaactcatggggctaagtctattaggaggtgaggctctaggccagtgcccagggtaacccttttcaaagctgaagagaaatcagaagttttatgaagccgcaggtctgtagatgggacacgcaggtgatcacctctgccctcgc

SEQ ID NO: 278 - DNA, 235 bp, Homo sapiens; identical to SEQ ID NO: 57
  misc_feature (1)...(235): n=a,t,g or c

SEQ ID NO: 279 - DNA, 457 bp, Homo sapiens
  misc_feature (1)...(457): n=a,t,g or c
tttcccggcctgctggggtttatttgtctagctgggnagggtagggagggnccagtcccaacagcctgggccttgggacagggcgggggcagtgatggcccctggagccctactgggggtggtagatgtggtcttggtcttcctccggtcccaggagcacctggtgatttggcatcacccacaaccggggcctntcctcgccctgggtcctcctcaggcggagggtggtacaggctntcatggtcgggntcgggantcaggacacggcccagggtntcctcggtntccatccagggccttggtgctggaaaggaatgggggcccctgcctgaacctcgtggcttcttcctcggtggtcaaaantttcggctttcttggacaaaggaacaagcaacaacaacttggtcgtcctttttccggagcttncaacaaaaaggggcgcccaangctttttttt

SEQ ID NO: 280 - DNA, 287 bp, Homo sapiens; identical to SEQ ID NO: 60

SEQ ID NO: 281 - DNA, 444 bp, Homo sapiens; identical to SEQ ID NO: 66
  misc_feature (1)...(444): n=a,t,g or c

SEQ ID NO: 282 - DNA, 448 bp, Homo sapiens; identical to SEQ ID NO: 68

SEQ ID NO: 283 - DNA, 415 bp, Homo sapiens; identical to SEQ ID NO: 70
  misc_feature (1)...(415): n=a,t,g or c

SEQ ID NO: 284 - DNA, 231 bp, Homo sapiens; identical to SEQ ID NO: 73

SEQ ID NO: 285 - DNA, 320 bp, Homo sapiens; identical to SEQ ID NO: 77

SEQ ID NO: 286 - DNA, 390 bp, Homo sapiens; identical to SEQ ID NO: 78

SEQ ID NO: 287 - DNA, 456 bp, Homo sapiens
ttttgggccacactgagtgaattttaatgcaggatggaagcacacagatgggtgatcaggtctctctttactgaaacacagaacatgtgccaaggtgagtccaaggacacctctgggaacaggtgaagcccctccccacacatacactccggtggatgtgagcgagggtcctgttgccacatctggggtcaggggcttggacatgctgcccttcatgggaaccttctgggtacctctcagcacagtaacgcagctgcagtctgtcggtgggggcccaggctaggggcagcaccctcttttggcatacgggacatgcctggctgcagctgatgtccgttagcctctcctgacacgcagtaaggagacctggaagtgaggcgcgtgggcgtggagttcccggtggagcttgctgcatcagcctttcttgccactctggggtcagtgaagtctttcccg

SEQ ID NO: 288 - DNA, 436 bp, Homo sapiens
tactttagtgttgatcagtttattagtatttttccaaacctgaagaatggtgaaagtttgtggtacagtgtggggaaaacagtaagtgtggctttgggcaagccacttcccttctatggctctcagttttcccatctgcacaatgagggggttggagtgtgtggtctctaaggcactgaatttcagtctgttctccatccatcagtggatatgtgagatgcaatgcaggggtgctggcctgtccctggtaatgagcgaggatatgagcaaagcagtgagtacagcctggaattccagctactcaggaggctgaggtacgagaatcactttgaacttgggaggctgaggtttcagtgagctgagatctggccactgcactccagcctgggcgacagagtgagactctgtctcaaaaaaaggattctacgactatgat

SEQ ID NO: 289 - DNA, 449 bp, Homo sapiens
  misc_feature (1)...(449): n=a,t,g or c
taaaaataatactccatgcattgtgggtgggcttcccctccgcagccccagcccaaggcagctgggcctagctgtcctcccccctcctctgattcatggaatgaaacttgttcatgagttcttccagctccgacccactttgctgcttctccaggaaggccttctgcatggtgagctggctgtacacgcggacncctcctcgccgcacactttcttcagctcctccttgttgagggagaagagctgcggcccggtcaagatgcccaggttctccacgatccgcgggctgaaggctttggcttccagcaaggcgcggacctcgtcggaacccgactcgtaggtgagcggctggctcacgggctggctgcgctccacgcggaagtgcctctgtggctgcgcctgatgttgctgattttccggatgagctcgtcgttgaactcgtccaatgt

SEQ ID NO: 290 - DNA, 410 bp, Homo sapiens; identical to SEQ ID NO: 89
  misc_feature (1)...(410): n=a,t,g or c

SEQ ID NO: 291 - DNA, 432 bp, Homo sapiens
acattgtaacaggtttatgcattttgaagtgccttctacacatccacccagaggctctgctgatttcacttatgcccaggctataaaatgcctttctctcatcccccagtagagcactgggatcaccactaggcctagggggcatatcaagggtttaatagactgggggaatgggcaacagaactggctaccttagaggctctggaatgccccccacccatccacccaccaatggaaggaaagtcaggcatcgctaaaaggagtggtccctatctagccccaagtctggagcagaaagggcaggtccattctggcccaagtgacattgttaagatcctgtcccctcccccaatcactgctgcttgccagggtgcctcttcacagttcccatgtggcagcagtagtggcagaggcagaagtggacttattgta

SEQ ID NO: 292 - DNA, 449 bp, Homo sapiens
tttatgatttgtttcagttttattttcctgtctcagtttcagtaaaagattcagagaactgattgacacacatcataagctatcacccatataccctaaatatacactgtttatgctttttctttttcacggaacaaggtgacactatctttgttcaaaccaaagtgaaaaggaagagatacaataattttaaaaagaggggtgtgtgtggtctttcactctcagatagtgaatgtacgtcaccacaacaaggaaaaagcgctgaggaagaatgtgcatcccacaggtcagagagtcaagcaggaagtaccagtagagcacctccaaatatagcaaatttggaacaactaggcattactgtgaaagaacttcctagtttttcatttgtctgccaccacattgctacattggaatttaagccctcttcacagtgccaatatcaaaatgag

SEQ ID NO: 293 - DNA, 139 bp, Homo sapiens; identical to SEQ ID NO: 94

SEQ ID NO: 294 - DNA, 278 bp, Homo sapiens
cactggaagcctgaggggctgttgctgagcctcagccccagaaatacaaaaagtctttatttcacagaaattagggccatttccatagttatggggaaggacgtgtgagcaggatgggaggtgctcagctgactgtcctctccagaaggctcttctgagctgagcaggagaccccagggccacagccgagccccaacctagacacggtctgagctccaaccttggctggctatacttcaagggcgggtagggccggcatggggctggagggagtcagc

SEQ ID NO: 295 - DNA, 275 bp, Homo sapiens
accataaacaaataaaattctttatttaaatttctcttgtggggaaaatatttttctttaaagcacacttaaaagtaatttgcatttacttcctgtaaagcatttccatttcacaattagcaaaactaaaaggctatgtctcttcatgcatttatttttgttagaaaaatgtcccatggtgctatcaaaccgattttaaccatcatcaagcttaactttgcctctgttgacaacatgactacaaacatgaatcaaaaaggagttaaggaatttta

SEQ ID NO: 296 - DNA, 293 bp, Homo sapiens
ttttttttttttttaacatttaaaaatacttttagtaaaatactctgtaccctgtcaaaactcctttggcacacagtaaatcatagtgaagaacaaacatagcagaattgccttagttgaggctacagtgtaagagagaatacaacttagaaggtaataatagaaaaatcatagcattttccagcaattgatatgacagtaaatttataaagaaatacaataatttcccagtgactcttaactgttcaggatgccagtgctaaaccaggttgccatacataattccaagaaag

SEQ ID NO: 297 - DNA, 389 bp, Homo sapiens
ccttttaaatgcttcttttatttcattggttgtacattgggtgagtgaactgaatattacaaccaaaacatagtattgatacaaattagactcctgtttacactgtaaggtaatgaatgagggaattctttaagtgttacagaaagatttagtagaaatgttaccagtggtatggctgaaagaatatttcggtgaagtgctgttatatcctgaaaaccaagagtgaaatgtagttcccatacaagtggagagttagtctcttaactacagtatttgttgaactgatatcttcatgtcttggatattggtgatttttgttttttaattaaacaaagcatttaagatttattcatcatagtcagacttctgaatataaacaaacttttggc

SEQ ID NO: 298 - DNA, 252 bp, Homo sapiens
  misc_feature (1)...(252): n=a,t,g or c
agccaagcacgttagatttnctagggtcatgtctgcaggtgaggtaacagcacacacatacagaaattcacgggcagagatgccaccgcagcatcaccgtcagacaccaaagcagcaggagggctcaggaagtggctttggaaagttctcgtgaaaatcaaagggcagctttggtgctcagagattcaaacagaaaactntacaaaaccaacccataaatatatatatatatataatatgtgtatatatata

SEQ ID NO: 299 - DNA, 377 bp, Homo sapiens
tttaaagatctaattggcttttattagcgattcatgaactgggtagcatccagcctacaaaataaaacagaagccctgccaggtatgatagaatggtctgcatttgtaaagcagcactagcaggaacaaggaaacagcatagtagacacagcagattggttaacatcaggttacttcaggttacgttccttgtgtggattaaagcagagggggcttcctcatcataatcacgcttgctcacgttgactggactccctttgatcagttgctgtgaatctcctgacttgttgaaactgtcctatttttaagttcactttgattacatggactccattcctggatggagaggtgagatcttggagttccattcaacataa

SEQ ID NO: 300 - DNA, 526 bp, Homo sapiens
tttttttttttttttttttttttttccttttcttcagagtttattttgaattttcatttttggataaccaagcagctctttaagaagaatgcacagaagagtcattctggcacttttggatagtacataagattttcttttttttttttaaattttttttaatagtcacattcagctcgcttgctcaaaccagactcccacattgggtgagcaagatgagcccataggattccagagttaatacgtaaccgtatatacaaacagccaaaaaaccataatggtgccacagggatggagcagggaagggcatctctaacgtgtcctctagtctatcttcgctaaacagaacccacgttacacatgataactagagagcacactgtgttgaaacgaggatgctgaccccaaatggcacttggcagcatgcagtttaaagcaaaagagacatcctttaataactgtataaaatccaggcagttccattaaaggggttaagaaaaccaacaacaacaaaaagcgagggact

SEQ ID NO: 301 - DNA, 361 bp, Homo sapiens
tttttttaactccccaaatttttatttttccatttttatcaccacaaatttcttggtaacaatgtagaatttaattttgtaattaaaacaaaaactctcccctaggaggaatctgatgacataaggataacaccaagttatgtgcacaaacgacaaaaaatgccaaactaactggaatgatcatccttcctgaaatttctcttaaaaagcagagaagtagaaccaatgctgccacctagtgcgcagccaaacaaatcaggtagcatactggagaaaaaggtcatagtcccgacaatctggtttccctgcctattatcaagccacctaactcctcacttttccacaaaaaaacacaaccaca

SEQ ID NO: 302 - DNA, 265 bp, Homo sapiens
tttaaaaagtgaaacaccaatagtttaattgaaatttcagaaaattgaacatatgaacaaggcaaataaatactaagtaagttaaaaacacaaaatatgtccaggaagtatcgatgagaatgttcaagttaaagttctccaatgccattgctacagcaacctcaaaccctaggttctctctgcaccattaacacagacatctcaggacatggtttgcttttttttaagacttaaataggaaactaatttttctttctttaaagca

SEQ ID NO: 303 - DNA, 271 bp, Homo sapiens; identical to SEQ ID NO: 95

SEQ ID NO: 304 - DNA, 310 bp, Homo sapiens
ttttatcaaatgaatactttattagagacataacacgtataaaataaatttcttttcatcatggagttaccagattttaaaaccaaccaacactttctcatttttacagctaagacatgttaaattcttaaatgccataatttttgttcaactgctttgtcattcaactcacaagtctagaatgtgattaagctacaaatctaagtattcacagatgtgtcttaggcttggtttgtaacaatctagaagcaatctgtttacaaaagtgccaccaaagcattttaaagaaaccaatttaatgccaccaaac

SEQ ID NO: 305 - DNA, 194 bp, Homo sapiens; identical to SEQ ID NO: 96

SEQ ID NO: 306 - DNA, 371 bp, Homo sapiens
tgttggccaggctggtcttgagctcctgacctcaagtgatccgcccgccttggcctcccaaaatgctgggattacaggcatgagccaccatgcctggccaacaccaacctttagttacttgctgaatacacaggattaaggaggaagagaaagtatcaaggatgactcccaggttcctagcttggtggtcccagtaattgagagagagaatgcagcaggaagagcagctctagggggaacaggatgagtatctccacatgatgggttggaggtacctgtgagtcacatccaggtggatgtgtcctgtgggcagtgggacgcgatctgaagctcaggcaagaggctagagttacatctttggagtcatcagc

SEQ ID NO: 307 - DNA, 472 bp, Homo sapiens
aaactttggcatttttattcagacacgtataaaaacaaaacaaaaaacttcagtgatacaacagacgttttcccttagttccccatccaaggggacagaggtgtgcagctgaagctggatcttttttctgtcctacctggaagcttctcactgctggatgagaatggcttctaaaagtggatcttggggatccttgtgaatttgccctcggataaggagtgaagatcatttacggcacatgtggattatggtttacacaaagatgtccagttatttttccttctgactacccccaccaccacttcctgagatgagatgtctaggtataggaggatgtggctgttggggttagacttgattcagtgcaaaaacaagaaacagtgccccttaaacaagggctgtaacttaaatcagtttttcttggcaccttacaataagagcacatgcacaggaattgggaggattttgcatc

SEQ ID NO: 308 - DNA, 454 bp, Homo sapiens
taacatgtttctttggaaaaatggcaatattgagtggaagagaagctgtccttttagacacccagcttattggcctgggtgagaacaactttgagaactggcatgaaagcagaggtctcactgaagttgctggtgctaactatgtgggtatgcatggtcaatccttctgagtagtttcgagtttcaatgctccttgcaatgttgtgtaaaccactggtgattgttggtgaaagtgtctgttccctaagtttatcatacagaaactccaaacgtttgctggcatcatctagcttcctcttggtttgagggtctgttgctgaagaaaggcagcgctgaataagatcctcaaatgtggtctttagaatgaggtgctcatctggaataggtttcttggtaattttttttgttggcaagactgcacatgctggaaggtatttccaataggagcccctgg

SEQ ID NO: 309 - DNA, 212 bp, Homo sapiens; identical to SEQ ID NO: 97

SEQ ID NO: 310 - DNA, 276 bp, Homo sapiens
ttttttttttttttggcgacatagtattttattttcctagaattatgtccagctgtgagaaagccaggttcaaatttaaatcctttaataacctgtcccagaattactaacaatgagacttaaacaaattttgatttgtgaagaaaacatgaaaaaagtccaaaagaaaccccctcaaagggcccgagtgtcaacagttcccctttggagcagctcatccatctctcaggtgggggtcctccggcaggcagcttcctctgtggcgccaggtgggtc

SEQ ID NO: 311 - DNA, 336 bp, Homo sapiens
gtcaaaagcaatttaatttttggaggaaaaactgcatacgcatacaacttatatctcaggcgaaatgtctcagaatcttcctgctcattggacagaaactcagcttcaccacattgccagccgggagaccatggaagggaactggcgccactgcccccagctgcccttcccaggggcaacttcaccaagatgcggaaatcctgggcccaccccacagtcagtcatcgctccatttcttcctggcaccaccacctccatctggcctgctccccaaccccccagaaagcaggtggggccaggcttcaagggcagtggccccatcaagattcagacgta

SEQ ID NO: 312 - DNA, 459 bp, Homo sapiens
  misc_feature (1)...(459): n=a,t,g or c
tacatatatagatctataatatgtataatctccataaaacatatattaaggcatgtaaagcaacataaagagccagctttatgaaataagagatgngananaggtggcagaggcgcagacattatttcttggtattttacatgtatttctaaaaaatattactttaaaaaaaaaaaaaagagacggacaaagtggcaggcatggaaggccctgaaaaatctgtttcctgtggagggagaaaggcttgggagaaagagagagagaggaaatgacctgggagccaatcccacctgccagtctgcaggggagaaagggcaggtttggggtgcttgaactgtgaagatgggaaatacagccaagggtcacgtttaaaaaacctgctagaagtgaagatcggtggaatcctcccaggctgtaatcccncagaaacatgngaatatcctaagcacctacaacagt

SEQ ID NO: 313 - DNA, 434 bp, Homo sapiens
gctctttgagaaagtttattggcaccaggaagggtgttgggagctggcaactacaactggtgagcaaccgggcaggcaaaattattcctagagcttcagcaagttctctcagcagttatggacaaagctggtcccagcttacagcacgcagtttcaccagctggatgtgcagagaattacattactagattaatgttatgtgcctgaggtgcttttatccctggcttcttgacttttgattgggtgtgataagaatgacttaatttggtgtaatccactttcacagcactgagcatacttagtatgtactgagggttgctcgaattaacggtgtgtaccgcaccccaggaaggcttaatgaagtaggattactgcttaagctaagacctttattaaaattttgtcctctggccagtcgtggtggctcatgccta

SEQ ID NO: 314 - DNA, 458 bp, Homo sapiens
  misc_feature (1)...(458): n=a,t,g or c
tttttttttttcccctaaatggtaggatttatttcaatgctcacatacaattgaatgagacaaactatttacataaaacataagtacaaaaaatataatacaatttatactgtacacaatcaggattcccttgttttgttccccccacaaatcggcagctagagatggtaagaagggggttggtaggaaagtgtgactgcacactcagcagtgctgaggatagatcttcagaatgctttttcataaagatgaatagggttgagatacagaaactgtcaatgcaccaagagcagtaagagagcacaacatattcacttctgtaataatagctatatattttttcttataaacgtgtttgtttctcaaagctgaggcttggagcaggtgtgagttgccttccattgattggttaggtgacctccgcccanccctgctccaacttccatagttgatccaat

SEQ ID NO: 315 - DNA, 493 bp, Homo sapiens
  misc_feature (1)...(493): n=a,t,g or c
aatttacaaagtttaatttccagaaattaatttgtgaattagatagctgaagctggatcattttcccttaatactggttaacacatacaatagaaagtagtatacagagaaagtatgtatgcaatactattagccaaacaaaatacacagaacaagaaattttattatctccaatgctggtgcatgacaaataacaagcttaattagaggaggagacagagggaaacttcagataccaaggtaatttctgggcaggtttaaaacctttaaaagttgntaggaataactggttccataaagtcctttttaagatatagcgctttttacttggacaacttttattaacagttccttaccaatatggaagttcaactaaaagtccttcatctgtcaagttaaaaacagccaagcaaaaccaaatttctctaggtatataacagcataagccaatgggtttggttttcnttggtacattcacacacattttaagtgt

SEQ ID NO: 316 - DNA, 219 bp, Homo sapiens
  misc_feature (1)...(219): n=a,t,g or c
tgcaaaacaaagaaaaatattttattgtaacttaaaattcatcccctagacaacagataacgcccacattggatgttatttagcagacatagtgaagatgcctttggacaattatcagcattgatgaatatgaagatgtcacatcaaagtcaaactttttcaggttattgggtttcctgaacataactggcaaaaaggaactttcaacacaacnagtag

SEQ ID NO: 317 - DNA, 347 bp, Homo sapiens
  misc_feature (1)...(347): n=a,t,g or c
tatttgcctttcctttttaatcctcttcttactccaactctttaaaaaaaaactgcccagaaaacccagtaattaagcaaaagggagctcaaagancaaggcaagccagcccaagagtagcagggtccctcccgcaggcnnaaagtctggatgctggggtctccactcagagcctggtagtaaaagctggtgcagaataaggtcgttccggaagctagcaataacccagcccagagtggctttctgcaatggggcacccctaacagggccaggctgtgtaagaagtggtgtttgttggccttgtcaaacagctccttcncgtatgcatctnggaanattggggccgt

SEQ ID NO: 318 - DNA, 241 bp, Homo sapiens
taaaaggtaaatcatttttattgccacaaattgataaattgttgtgaaaaaaagagaaactggcacacatgaaataacacaaacataagaagatataagaccaaaatagatttgaattatgtctcccaggctggattgcagtggggcgatctcagctcactgcaacctctgcctcccaggttcaagcaattctcatgcctcagcctccaagtagctgggattacaggcatgcaccaccatg

SEQ ID NO: 319 - DNA, 409 bp, Homo sapiens; identical to SEQ ID NO: 98
  misc_feature (1)...(409): n=a,t,g or c

SEQ ID NO: 320 - DNA, 164 bp, Homo sapiens
gcattattttaagatctttattattaagtaactcactggggttgtcaaagtatgttataaaattacacagataattagagatatatgttacatagaaatgctgattttacactctcttctgagtacaagcatttgattacagaggctcatagcacaacaaaatg

SEQ ID NO: 321 - DNA, 399 bp, Homo sapiens
  misc_feature (1)...(399): n=a,t,g or c
ttttttttttttttttttgaactttagaaggtttattgttgatagagctgtagtgattctgaaacttgtatttatggtagcactgagcaaatgagtgaaatatattgagaataatgggagccagggttattactgctgtggtaagagagacaatacagaatgggggaaggcaaagaagcacccatggtnttggattaaaagtttcagtatgaactcatgatttaaaagtatgataaatatgtattcatatatacatgtgtcccacatatatatacacacacttatttgccataaattttcctagttctgtctgctgaaatgcctcaaaggcantgatatccagtntcagtgtgantacctngtgccaattttaggcttctaaatggacatacctactaa

SEQ ID NO: 322 - DNA, 364 bp, Homo sapiens
aaggctgctgttaaataactttaatggttgatgtgggagtcacaagggagttatgtttgctccaagggttcttcagtgccatcctcaaagctggttagtgcagggaggtagggcagagttggttccagttttcttccaggaagggtttagggaggtcccagcgagccccaggaatgagtccctcggtaccatggcaaccacaatttaagaggggcttctgccaacccctgcagcctaccccagggtccagcagaggaacaggaggccagactggcaaacttgctatagacagcgccgtatccagagcccaactgcgcatgggtcattttctcttctggggcagatcctatgccagcacctttct

SEQ ID NO: 323 - DNA, 282 bp, Homo sapiens
cccaaaaatacttccatttaatatagtcatatgaaagctaatcagcaagaagggagattgacagacatgcttaggaaaatagctacgtaccataccaccacaccaaagtgttgttttttgtttttgttttttttttaaacaaatggagaaaagacagaccagccaggatgacttcccacagggaagggatttaagggctgcccccatgaatttcttcaggccacggcagctacttcctcctcttgtatctggatttagatttaaagtttcctcctcgtctct

SEQ ID NO: 324 - DNA, 307 bp, Homo sapiens; identical to SEQ ID NO: 99

SEQ ID NO: 325 - DNA, 257 bp, Homo sapiens
  misc_feature (1)...(257): n=a,t,g or c
ttttttttttttttttcagtgatttctgcagttttttattctagccaggntctaggngctggcctggaactataaaacaaacatttcacaaaaagttatgacaatatacaaaggaaagacaatttctttgaatatccataatctcaatatgcagtctggctgtggatggccaagagatagtttccttaactggaaaaagcttttaaatgaggcttggtggaagatatatctttgcatcattacaaagaagaaaaaag

SEQ ID NO: 326 - DNA, 468 bp, Homo sapiens
ttttttttttttttttttttttttttttttttcagaagtaaaagatttttattgttctatagacacttctgaaaagagatctaattgagaaaatatacaaagcatttaagagtttcatccccagagactgactgaaggcgttacagccctcctctccaaggctcagggctgagaacggttagcatatcgaatgatcagtaaaaacatgcaaaagtgagaaggaaagggaaaaaggtgcattcccctaagctgagggggatggaatttcagaacagaggaggcagggtggacaagtaccaggtggctctccctttccctctgtgttatctttcaaaacagttccaagcttggagaaagcaatgagctccacctactcagcagaacccacggctcgtcccccgtggacgtgactgagcagtgaccttgcctgccccgttcctcagccgctccccctcgtgccgaattctt

SEQ ID NO: 327 - DNA, 172 bp, Homo sapiens
  misc_feature (1)...(172): n=a,t,g or c
tgaaaataaagcacatttattaaggcaaaggccaagctggcgcntcagaacatggccaaggagcgtgaagggattgctccactttaccaccactcagggcacccaggccccaggggtcctgggtccacccccccaggccagcagaagctatgaagcttacgcataagcctgg

SEQ ID NO: 328 - DNA, 454 bp, Homo sapiens
  misc_feature (1)...(454): n=a,t,g or c
gagccggaagtctcgggtgtcatttattgacagcagttnatacacatttgtttccttcccagtgcaggcatagagcccgtgagaagggcagtctctgaacnatgnggccaggaacgtaggtcggacacatctttggcaggcatgttcagccccagcaggatggaatccttcaagttngaattccactgggtatctcgaganggaccaaggtggggggtagagaggaagtcttcaacagggactcacatctcggtccaaggcctcctctctcactatacaaggtccatccaagttttaggaccctggggggaacaagtcatggcccacccacctcaacanggggcagattcttcaatctgtgcccagtttcacacacaccttgtttccgctggttcacacagttaaagangaatcagacttattggtaacagacagaccactttcctctctgccc

SEQ ID NO: 329 - DNA, 346 bp, Homo sapiens
  misc_feature (1)...(346): n=a,t,g or c
ttttttttttttttttttttttaaaagactaatgtaacttcttttaattgtcattttatgctttctgcagctgcccgccaccctcccttcccttggatgaccacttttgtaggctataggggaccagggaacaaaggctgtttgnnnnnngggngggacanannanccccaatcanntgnnnnanannaagctanaattacaaatnnannacaanaantaatgctgannnctgggagagctgcanagnggggaggcccgctcctctttgtcagggtctatttggcagtgaccttgctctgaaggcgatggtactccttcagctgacctnggccaccccggatngaa

SEQ ID NO: 330 - DNA, 565 bp, Homo sapiens
  misc_feature (1)...(565): n=a,t,g or c
ttttttttttttttttaataaaaatctttatttttttattaaaaaagaagtactttggtagctatttaaataagnngggggtgggaatgaatgtcgagatacgagcacctgcatcttttagtcaattgtcagtggagtcggtggggtgctaagtgttctgaactgaagtaggtgcactaaggttccaagctccctgcaaggatctggacgggaggaaagcagaggccctgaagggaaaaaagcctgcttcccaatacttattttttattactgtacaaaaagcacactctccctctttttgtctctcccaccaacggcacccccccacccccaacccaagaggactatacatggagtgcagggacagagttgaccaggaggcctttgtccggcaccctgcccacaggctgagctcagccccaggccctttcaggcatctagacactcccatagcctggtcangctggggcaagggagatnccaggtcacacatacttccctggaagagttggacttaggggtaagagccgggtgcacggtanccagncttgctctcattcccang

SEQ ID NO: 331 - DNA, 327 bp, Homo sapiens
tttggaaaaagaaataaactattttaatgtctgataattatggggtagcccttgcattgcaagatgatgatttgattatggacacattatcaacagaattgaatttgcatggaactcaagacacgcttaagatcaccacagcataactgcagatttcaggaattacagtcatagagggtacatcaacttgaagagtagattgagtcttacaggaagtgagttacaataagtaacattaagagcccagctgccagcctgggattacaggcgtgacgactgggtccggcctgctttttttttttttttttttttttttttggagacgga

SEQ ID NO: 332 - DNA, 432 bp, Homo sapiens
tttaagcatatgagtgtttaatactggaaaagagataatggcatatgtcagtctcacgtctctttcgcagcgagcaatgaaatgggtgactgtggaggcagattctccctagcacatcttctccgtctgttcagttcacacgcagcagccagttctgcgggggcataggcagctatgggtttggtcctgagccctgcgatgctggctgggcggggggctgtgtggtgccctgtggctgggtggtggcagggggggagccagtctgcagctgggcctgaaactgggcaagctgctcaggactggccagtgtcttcagcagattgttctcctgctccagctgggaatttttctctattagttctttgatttgctctttgaggacctccacttcttctctgaccgcatacatcaaatggcttttcaccctcgtgc

SEQ ID NO: 333 - DNA, 281 bp, Homo sapiens
tgttgtgtataaatactatgctttaatgagccccttaaatagaaattccactacaaaaatacagaggagatagggtgtttcctgtatccgcctcattcccatagaaaactataagggaagaaatagaacttggaattaaagcagcagcaaggcgaggtgagaatgcgatttctaggccatcttgttgggactgatgaacagcatctctgatctcatgatttaacatctggttatccagaagggatgggattggcctaaaaaaaccgatcaatttctggatt

SEQ ID NO: 334 - DNA, 440 bp, Homo sapiens
gcaggagaatggcttgaacccgggaggcggaggttacagtgagccaagatcataccactgcactccagcctgggtgacagagcgagactccgtctttaaaaaaacaaaacaaaacaaaacaaaaaacaacaaactcatctttactgaaccatttcataagctctactttatttgtctagttggatttcatttcttctggaaaatttattgtttattggcatgtgacccttgactgatggcttcattagcattttgtttttctttttggatccttaatagaaaactcaattctgttagggatttccaaataggatagggcaaagtcgcacttagtatatcctccacagaaagaaagaagcaaaatcaagccaagagggccctttacttgtcctcttgctaagttaataaatagactggtggatggtggtagatggagaaac

SEQ ID NO: 335 - DNA, 354 bp, Homo sapiens
tttttttttttggggggtcctgagatctttatttctggatgttgctgtgtgttgggtataagatccagaacttgctaccagcctgaggagaaatcaaacacatggagaaaggaaagctgacagcccagagacccacggggaaacaggccccgagttactggatacaggcaaccctaaaactgactgtccctctggactctacgtagtgagccaacacatttcctcattattttggatatgtttttttcagttgaaggcattctgattcaatacaggtgaaacttttctttgcaaattacaaagtgtgataactgttgctaaagtttggaatgtgcttagagggagatcatgaac

SEQ ID NO: 336 - DNA, 509 bp, Homo sapiens; identical to SEQ ID NO: 104

SEQ ID NO: 337 - DNA, 253 bp, Homo sapiens
tttttttgaggattgaaaaattatctttattatcttgagtgggagctggagctggaagtctccacgttctccctccaacaactcagctcccattgtacccatctggggacttagatgaagttacaggtcagttattggacagctcacaggcctcttgattcctaggagtcaataagaaggctttggagtccaggcaggaagtcagggacttgaattcctccacacacttttcgggaggatgtggtgagcgatt

SEQ ID NO: 338 - DNA, 387 bp, Homo sapiens
tttggtggcaatcacagtctttaatcattaattgtcatatttctgatttgttagcaagtgccagcttgtaggctggttgaagtacagaactcagaggaaaaaagaaattaaattttagctttctggagagcagcccctctctggcaccatcaaacacttctttgtttcccttcaacttggaactcttcaaacatcaggggttgtgagggtttggccattcttttatcttgggtccatgtgagtgacagaaatggtgcggcctgggaaagatctccctcctttacattttctcttctccctcctcctccttattctaaaactgtgcctccaacagaggggcaggggctcttgtagagagatccctggcccaggacaggagatgccaaa

SEQ ID NO: 339 - DNA, 271 bp, Homo sapiens; identical to SEQ ID NO: 105

SEQ ID NO: 340 - DNA, 468 bp, Homo sapiens; identical to SEQ ID NO: 106
  misc_feature (1)...(468): n=a,t,g or c

SEQ ID NO: 341 - DNA, 432 bp, Homo sapiens
  misc_feature (1)...(432): n=a,t,g or c
canatttttatgtttcaataactgatttattttttaccccttgtacttaagatttaacatgtgttgtatttccagcagttcaaatctaattgtgtcgaatttccaggattggaggaaaagttgctccctttcagccctcctactagaagcactggagctaggctggcgggcattggaccctagtaggtatagcaggctgtgaagagcgactgggtggaagcagccccagaagaacccgtgtgaacatactgtcctttggccgcctggcaggttagccatggcccggcttcataaaagcctcctgggttgcctccttgtttggcagccttgccaccccaggnagccagnggcactggncttggnagggcccggtccataaggggaaacctnagttttccaggggctttgggttanaaggggnaaagggtggtt

SEQ ID NO: 342 - DNA, 309 bp, Homo sapiens
  misc_feature (1)...(309): n=a,t,g or c
cctctttctctctttttaattgctatatattagcttagaacaaggtacaaaatttggagattcacaggaacagcacagaagtttaacaatattaataaagttctaacacatgacaggaaagtttatctgggntcttgaaggcaacagctggntctgcatgcacattnctgggagtcnagtggattcnggaanaggtcttctctccatggctccatcttgctctttcacaaaggacccctaggtccatggcaccataagcccagggcnagtgatttgnagcatggagaagggaatngaagggncccgcta

SEQ ID NO: 343 - DNA, 375 bp, Homo sapiens
  misc_feature (1)...(375): n=a,t,g or c
tcgcattcaacttaaatgnttaacatngacaatgtcttggaacaataagcaaacaatgcttaaatttttcattcaaattcactttccacatgtcaaaagacctcaaggtagaaaaaaataaaataaaaatataaatatctgagaatccatcttaataaataaattaaaaacncnnnccaacgttttcacnnccccntgttaatgtcagaacattcagaccacctcaacaatgcatgatcagtaacattacaatgaacattgatgttgaagaaaaactacagtacatggatatagctatttatttctatctaccagaaaataaagtcgtatcttttcttagtataatattggtcatttctaatcagaacacactat

SEQ ID NO: 344 - DNA, 424 bp, Homo sapiens
  misc_feature (1)...(424): n=a,t,g or c
atcatcattcatttatccttttatttagtggcttagatcctagaagatagattccctataaaatcattttagccacgaaatattcataagaaaccaacttcaaatgttaatgaggatactgaagttttttttaacctaaaaaaagtggcaattttaggtaaccataaagctgaggcaaaggcagtttgggttcttggaaagaatcctgcctaccatcttcagtggcctctggnacaaagcacttatgatcactgcagaggtggagcaaggtaaaggactgtgtcagcagttcatgttgtgacagcagcagcatctgcagaaaacgcaggtcatataccttggcttacacaaggaatgctattgaaaaatgagccaccaggtgggagcttttaacataggtaatgattagtgaaagcctcttagt

SEQ ID NO: 345 - DNA, 333 bp, Homo sapiens
  misc_feature (1)...(333): n=a,t,g or c
ccgctcgagttttttttttttttttttgtgctcaaacattttaatcatttctgccctgtnactcccaccccagatccaagcgccanccagttccggtgggggctcagtcctccggagtccaggagtcagggctcgggggcgctcagcggccagtgggcaagattggggcctttcctgtcctcgaagntgcacaaaggtggncccagcccagancacagggagagggcagagagatgtgctcatcagtcttggcaggcgggccgggagcagtcttccagaaacaggtgggagccagggctnattttcatagccaagggtcccatgagcttccca

SEQ ID NO: 346 - DNA, 470 bp, Homo sapiens; identical to SEQ ID NO: 108
  misc_feature (1)...(470): n=a,t,g or c

SEQ ID NO: 347 - DNA, 453 bp, Homo sapiens
  misc_feature (1)...(453): n=a,t,g or c
ctgttaccctctccttttcactctctctcattccgttccctttcttctttcaacatctaacatggtaaagttttgtgctaataaccaaggcaagacaaaacttatattcatgttcttccataaagaatctcatatcatcataggaaggccaaggccagaagggaaaagaaagagaaagaagaggggaatccaaatgaatgtctcttagatgtctcactgcgcacgggcttttccggacatcttccactccttgtctcgaagcttggctcgttgaattttccctgtgacagtcttggggcaggttcaaggacaaactctatctttcttggggtacttgtatgggggctgtcactgactttcacatgctgctgcagctccttgggtgagctgtttctggggtcatgggggacagggaactncgaggccaggggnccacaaatgcctttcaccacc

SEQ ID NO: 348 - DNA, 408 bp, Homo sapiens
tttttttttcagatcatattcctttattacatatatgaaatataaaaacaaattaacaaagcaatatatatatatatttgcaagtccacaggcttcagagaaaaaaaggttctgtatgtgaaattattcatatggcactgtgttcatgttttgtatattcaagtacaaaagaaactatgtatagtggttatgcgtgggtacagaagatgaataataatgaaaaactgtgattttttgactatcacatacattgtgttaaaaaacaggtaaatataatgactattactgttaagaaagacaaggaggaaaactgtttcaatgttcaggtttaaatactaagcacaaaaatataacaaattctgtgtctacaataatttttgaagtgtatacagtggcattgccaatgga

SEQ ID NO: 349 - DNA, 5654 bp, Homo sapiens
gctttgtttgatggtgatccacatttatccacagagaatcctgccttggttcctgatgctttgctagcctcagacacttgtctggatataagcgaagctgcctttgaccacagtttcagcgatgcctcaggtctcaacacatccacgggaacaatagatgacatgagtaaactgacattatccgaaggccatccggaaacgccagttgatggggacctagggaagcaagatatctgctcatctgaagcctcgtggggtgattttgaatatgatgtaatgggccagaatatcgatgaagatttactgagagagcctgaacacttcctgtatggtggtgaccctcctttggaggaagattctctgaagcagtcgctggcaccgtacacacctccctttgatttgtcttatctcacagaacctgcccagagtgctgaaacaatagaggaagctgggtctccagaggatgaatctctgggatgcagagcagcagagatagtgctttctgcacttcctgatcgaagaagtgagggaaaccaggctgagaccaaaaacagactgcctggatcccagctggctgtgctgcatattcgtgaagaccctgagtccgtttatttgccggtaggagcaggctccaacattttgtctccatcaaacgttgactgggaagtagaaacagataattctgatttaccagcaggtggagacataggaccaccaaatggtgccagcaaggaaataccagaattggaagaagaaaaaacaattcctaccaaagagcctgagcagataaaatcagaatacaaggaagaaagatgcacagagaagaatgaagatcgtcatgcactacacatggattacatacttgtaaaccgtgaagaaaattcacactcaaagccagagacctgtgaagaaagagaaagcatagctgaattagaattgtatgtaggttccaaagaaacagggctgcagggaactcagttagcaagcttcccagacacatgtcagccagcctccttaaatgaaagaaaaggtctctctgcagagaaaatgtcttctaaaggcgatacgagatcatcttttgaaagccctgcacaagaccagagttggatgttcttgggccatagtgaggttggtgatccatcactggatgccagggactcagggcctgggtggtctggcaagactgtggagccgttctctgaactcggcttgggtgagggtccccagctgcagattctggaagaaatgaagcctctagaatctttagcactagaggaagcctctggtccagtcagccaatcacagaagagtaagagccgaggcagggctggcccggatgcagttacccatgacagtgaatgggaaatgctttcaccacagcctgttcagaaaaacatgatctctgacacggaaatggaggaggagacagagttccttgagctcggaaccaggatatcaagaccaaatggactactgtcagaggatgtaggaatggacatcccctttgaagagggcgtgctgagtcccagtgctgcagacatgaggcctgaacctcctaattctctggatcttaatgacactcatcctcggagaatcaagctcacagccccaaatatcaatctttctctggaccaaagtgaaggatctattctctctgatgataacttggacagtccagatgaaattgacatcaatgtggatgaacttgatacccccgatgaagcagattcttttgagtacactggccatgatcccacagccaacaaagattctggccaagagtcagagtctattccagaatatacggccgaagaggaacgggaggacaaccggctttggaggacagtggtcattggagaacaagagcagcgcattgacatgaaggtcatcgagccctacaggagagtcatttctcacggaggatactatggggacggtctaaatgccatcattgtgtttgccgcctgttttctgccagacagcagtcgggcggattaccactatgtcatggaaaatcttttcctatatgtaataagtactttagagttgatggtagctgaagactatatgattgtgtacttgaatggtgcaacccccaagaaggaggatgccagggctaggctggatgaagaaatgctaccagatgattgacagacggttgaggaagaatttgaaatcattcatcattgttcatccatcttggttcatcagaacaatccttgctgtgacacgaccttttataagttcaaaattcagcagtaaaattaaatatgtcaatagcttatcagaactcagtgggctgatcccaatggattgcatccacattccagagagcatcatcaaactggatgaagaactgagggaagcatcagaggcagctaaaactagctgcctttacaatgatccagaaatgtcttctatggagaaggatattgacttgaagctgaaagaaaagccttagttggccatgctggaagaagaggatgcttttctggttcatggttctgttgaaacatatctacctgaaagagacagggctgatgttacctttttccactttgcactacctggtgccattctaaatttctaaggggaaaaatagaaagtttgtttactcttaagatattttatgaaattgtgtgtactttcctattttgccaattatgtgcctcaaagattttagttgagccttagcaagaaagtaggaccttccatttcaatacttcattaacacggtgtagtgatactttgtcccttagactggtgtttaccagtaagatacctttaatccactgttaagtatgagtggatttgtttccatagattagctggatttccttttggtgattgcattaggtttaaagtacacaggtctcaactctccccaggaaagtttcccctgtttgactccacctttaaaatcctaagcctgactaggacagccacaaaccacacaaggtgtaaaaccatcatcagctaagtgcccgttttgttcttgtttaccagaatctcctttaacttctcaaagggaagccgggctttctaatccacgtcaactttattttagttgtcaaattgggcattatattttatgtaaattggtcttttaacatcattttcctgatgaatgttggtgaccaccacattgtgaaatttaagaatccgtgttgcatgtttggtagctctctgagtttcaggccataaactcagctccagaggttaccttttaagtgccaagaactcaagtgcaaggtggcctactcaaaaatcatttggtagcattcagttattcatgaattcctctctcgcatgcattataaaaagtgatctgctttaaaacaccgtaatctgatcataggcttaaaattaaatatgagtattactttcatgtacaaaatatttcctttatagtcttcatatgccctttaaaatgccaacaagatttcaagtctgtaggcctctagtgaggtggggtggcaaaccacagctaagtctcgctcaccactgcaagctaagaatggtttttacattttgggttggaaaaattttttttgaatatttcatgacacatgaaaattattcaaatgttagtgccgataaataaagtggtactgaaacacagccacacaaacttgtttttgtactgtctacagctactttcacactacagccgcagagctgagcagttcagcagaccgtatgtcccacaatgcctaaaacattgactatgtttacagaaaaagtttgctgacccctgctctagcaaacgcatcctttcctactccaccccaatttgtatttagatagtttctctaacagaacggacaaatgaggctgcaaactaatttatttttgtcaaaaatcaatgttttgacatccacagacagtgaaataaaagaaatggcttgctgaaaaacatgaggagtcctagccacaaaatcactgcttaggttgcaattgccaaaatgaagccttcttagaagcacttctttagtatatacaggtgttggctgaagtccgtgcctcactctgggaaccattcttagtctccagtgtctcctattacaaagaagctggcagaaataaaaatgaaggggtgagagcggttccaccctagtctcatggtggaaaattcattggggagagctgtccaggatatttggagtcctgggtagaaggagcttgtaactactttaaagtcgacatctttgcacaggtgattgagtttctctgacctcattgcttcacctctgtctcctcccgtccttccgcacgtgcccacacacacgcagttcagccctctttcctccataagcctccatcgttttctcttttctcctcttgatcctttcaagcgagtatcttgttgaattgtatgttctgttggatctcctccttcataacatctggcttgttggacagaaaaaccctacagcccaccccctcccacagcccacctccacttttgaaagcccaaattacacctctcccagaacacagtgttgacgtaaatacagttacccaatattcctgtttgttcacctatttgctactttcactcagtagcatcccattttgtaaaatgaattccatggtcaccctgtcacaggaagtaatgaaaaatccagtgttcagtgtagtggtgcaaacctgagggcatagagctgttcatagagggctcttgttatagccaaacagacacagcaacaatctcaccatttatatatatatttttaacttgtccagctcatctatggaaaactactcaggtggtatgctgtttgaagcctcatcttcctacatgaaaattatgggcatttgtcccaatgattttgtttcagctgttctgtaggctgcataaccactctgatatttaggtatctgctattttattatcttaaaagacaaattaatttaattgcatgtgctagggaaaagctaccatgtacattcaccccaagtaaatagaatcctagatgaatcctagaaaaataatccctaagcagataggtagacagaggtaaacattcacatgatttagctctctagctcttgcactctgaacattcttgctttggttctgacttctgggaactgctttgcatttctcctatagatctgtagttaagggaaccaaggggtcattggggcaaaagcattgtttctcaaagctccttgattaagagaaagaacagaaatttgcacagaagatagtgtcaaggagtgagaaagtttgtttgagggcagtagctcagtgtggaagaaaatcctgaagtttctgttgaagccatacaatgttctatggggttactctctaagacattctctgaggtgtgtgaggaagtcactactcctagcctttgttaagatgtaattttaaatattcagttatggtactatgtttgcaactctcgtcttatcacaatgcctcagtagtttgttcccttagaaacatttagatgtgcacaaattaatcttttatatatctaaaggtttttctatcatgcattggattgctcagaataaagtgtctgttagacttcgttttggtaaataaattctccataatgtagattaataatataaaagtctttaatgacacaatatatctatatagcctcactgtataattcagaaataaaaattgattctgc

SEQ ID NO: 350 - DNA, 5423 bp, Homo sapiens
agatggcggtcttggcacctctaattgctctcgtgtattcggtgccgcgactttcacgatggctcgcccaaccttactaccttctgtcggccctgctctctgctgccttcctactcgtgaggaaactgccgccgctctgccacggtctgcccacccaacgcgaagacggtaacccgtgtgactttgactggagagaagtggagatcctgatgtttctcagtgccattgtgatgatgaagaaccgcagatccactctctccttcctgcttcctccttgctgtggtggctgggatgcttcttccatgattttttgaatctagactgggctgttctctgtgttaaaccaatcagttgcgaccttctcttaacagtgtgaagtgagggggtctctctccctccttctccttcctctgtgattcaccttcctttttaccctgccctgcggcggctccgccccttaccttcatggacgactcagaggtggagtcgaccgccagcatcttggcctctgtgaaggaacaagaggcccagtttgagaagctgacccgggcgctggaggaggaacggcgccacgtctcggcgcagctggaacgcgtccgggtctcaccacaagatgccaacccactcatggccaacggcacactcacccgccggcatcagaacggccggtttgtgggcgatgctgaccttgaaagacagaaattttcagatttgaaactcaacggaccccaggatcacagtcaccttctatatagcaccatccccaggatgcaggagccggggcagattgtggagacctacacggaggaggatcctgagggagccatgtctgtagtctctgtggagacctcagatgatgggaccactcggcgcacagagaccacggtcaagaaagtagtgaagactgtgacaacacggacagtacagccagtcgctatgggaccagacgggttgcctgtggatgcttcatcagtttctaacaactatatccagactttgggtcgtgatttccgcaagaatggcaatgggggacctggtccctatgtggggcaagctggcactgctacccttcctaggaacttccactaccctcctgatggttatagtcgccactatgaagatggttatccaggtggcagtgataactatggcagtctgtcccgggtgacccgcattgaggagcggtataggcccagcatggaaggctaccgggcacctagtagacaggatgtgtatgggccccaaccccaggttcgggtaggtgggagcagcgtggatctgcatcgctttcatccagagccttatgggctagaggatgaccagcgtagtatgggctatgatgacctggattatggtatgatgtctgattatggcactgcccgtcggactgggacaccctctgaccctcgtcggcgcctcatgagctatgaagacatgattggtgaggaggtgccatcggatcaatactactgggctcctttggcccagcatgagcgaggaagtttagcaagcttggatagcctgcgcaaaggagggcctccacctcctaattggagacagccagagctgccagaggtgatcgccatgcttggattccgcttggatgctgtcaagtccaatgcagctgcatacctgcaacacttatgctaccgcaatgacaaggtgaagactgacgtgcggaagctcaagggcatcccagtactggtgggattgttagaccatcccaaaaaggaagtgcaccttggagcctgtggagctctcaagaatatctcttttggacgtgaccaggataacaagattgccataaaaaactgtgatggtgtgcctgcccttgtgcgattgcttcgaaaggctcgtgatatggaccttactgaagttattaccggaaccctgtggaatctttcatcccatgactcaatcaaaatggagattgtggaccatgcactgcatgccttgacagatgaagtgatcattcctcattctggttgggagcgggaacctaatgaagactgtaagccacgccatattgagtgggaatcggtgctcaccaacacagctggctgccttaggaatgtaagctcagagaggagtgaagctcgccggaaacttcgggaatgtgatggtttagttgatgccctcattttcattgttcaggctgagattgggcagaaggattcagacagcaagcttgtagagaactgtgtttgccttcttcggaacttatcatatcaagttcaccgggagatcccacaggcagagcgttaccaagaggcagctcccaatgttgccaacaatactgggccacatgctgccagttgctttggggccaagaagggcaaagatgagtggttctccagagggaaaaaacctatagaggatccagcaaacgatacagtggatttccctaaaagaacgagtccagctcgaggctatgagctcttatttcagccagaggtggttcggatatacatctcacttcttaaggagagcaagactcctgccatcctagaagcctcagctggagctatccagaacttgtgtgctgggcgctggacgtatggtcgatacatccgctctgctctgcgtcaagagaaggctctttctgccatagctgacctcctgactaatgaacatgaacgggtggtgaaagctgcatctggagcactgagaaacctggctgtggatgctcgcaacaaagaattaattggtaaacatgctattcctaacttggtaaagaatctgccaggaggacagcagaactcctcttggaatttctctgaggacactgtcatctctattttgaacactatcaacgaggttatcgctgagaacttggaggctgccaaaaagcttcgagagacacagggtattgagaagctggtgttgatcaacaaatcagggaaccgctcagaaaaagaagttcgagcagcagcacttgtattacagacaatctggggatataaggaactgcggaagccactggaaaaagaaggatggaagaaatcagactttcaggtgaatctaaacaatgcttcccgaagccagagcagtcattcatatgatgatagtactctccctctcattgaccggaaccaaaaatcagataagaaacctgatcgggaagaaattcagatgagcaatatgggatcaaacacaaaatcactagataacaactattccacaccaaatgagagaggagaccacaatagaacactggatcgatcgggggatctaggcgacatggagccattgaagggaacaacacccttgatgcagaagatttagcaccactatctccgttccatctgggcttatatgtacttttattttttggtggtgaaattgactgatgattttcctttttcttcgctggactattgtgccaactgccaggctgcctcctgcccttacagccctaagtggctgccttctttccatcaactcccaacttcttcctgtgaagtttaattgtctcaacgcctccccctcccccattccctccatttttctcccaagaaacctgactcaattatttgcatattttgagaaactgctgcagattagttctttttgccagttttccctggaactcctggccttttgtggaggggagggatggagagaataggaatcttcactagaagccgtgggaagaattggaagttacatgctgtatatgcaatgtccagcagtctgataaactgacgattcttaatcaagatttttttcctgatggggaagggacttttattttcttttagagaggggaaagtgtgagctcttcccttattcctaatggctatttttgaagcaaagaaggccagcaacattggcacatgccacctggcaaaggacccttgagtaagtgaaggtctcctaaaactgggattaagaaaccttgctctcctcatctccaaggcagggaccatcaagaacctacagactccatctcttctgcaagcctcatgccaaccctgggctattgctgctgccccttaaacacaggctgtccttaacccacctctcctgccctgtgatatgtctgctgagttggcctggccatttccaagaggctgtagaaaggggagaatgtcaaggaagacttttggtagagaaggagcagaaagatgtgtttttgggaagaagaagacctctaggaggagctagtaggaatgtacatgaagcaattagtctgaaactggcttccccactcccccgtttctccttttcctatccttataggcctgtcccttgcctctgccctggattggttggcaaactaaaggacttgatgtacataactcctgtcccttttcccttacaaggtggggattgcccctggctttgcctcttctttgtgcctttggcctggggtgcatctcctcccgcccttccatgtgcctttctttgcctctgcagtctcatttctcataattttgcaaattatattttgttgctttcttacctactattggccctaaatagcagaaagaagagaagtgaccgagagaacctcagattcttcattgaggattggtatagccatgatttcagtcatagcaagcttttgctcaacagcatatgggtgggattttgcaaaaatcctattctgatgaatctcaaagtaaggctggtaagagaagtgagtggtgtgactcttactccttaggtgcccagaatttaccatcatctctgaaggagttacagggaagtggtctccccaattctcccctccctccagtattgccccctctcactttagcatatattaattagcaggttgggctagagaaatcagctgctatgcgggttgattattattattatttctaatccttttccttatttgccttctactccccttaatctaatctaaaagctctgttccatgcaactggagttccttatccctctcttccccttcccttatatattgaggctatggggtaggagaaaagtgcacaacccaccaccccctttactcgtgcattaaaatttcttatttacccttttcccccttcccatttcttcccactttcatctaccttttctggcaaaaaggagccttttgctctctgtgaccctaagagcacactgcacagggaaaattgccccatccagacctggctccactcttgatctctcttgtcctcttctgctcttttcctggtgctcttttttctcggtggggtgtgggtaatagaacagccgtgggcttttggggacctttaacttttttttctctcttttgtttataaaaaacactaaacattcaattccagagaaccaaaaatcccaccttcccaccgaacactactaaggggcttgtgttctgctccataccttttctcttttctttctgtcttgttaatgcttttaaaaacaaatgagttttttatataaataaagtttttaaagtgtgt

SEQ ID NO: 351 - DNA, 55795 bp, Homo sapiens; identical to SEQ ID NO: 109
  misc_feature (1)...(55795): n=a,t,g or c

SEQ ID NO: 352 - DNA, 1996 bp, Homo sapiens
atggcggcgatggcggtcgggggtgctggtgggagccgcgtgtccagcgggagggacctgaattgcgtccccgaaatagctgacacactaggggctgtggccaagcaggggtttgatttcctctgcatgcctgtcttccatccgcgtttcaagagggagttcattcaggaacctgctaagaatcggcccggtccccagacacgatcagacctactgctgtcaggaagggactggaatacgctaattgtgggaaagctttctccatggattcgtccagactcaaaagtggagaaaattcgcaggaactccgaggcggccatgttacaggagctgaattttggtgcatatttgggtcttccagctttcctgctgccccttaatcaggaagataacaccaacctggccagagttttgaccaaccacatccacactggccatcactcttccatgttctggatgcgggtacccttggtggcaccagaggacctgagagatgatataattgagaatgcaccaactacacacacagaggagtacagtggggaggagaaaacgtggatgtggtggcacaacttccggactttgtgtgactatagtaagaggattgcagtggctcttgaaattggggctgacctcccatctaatcatgtcattgatcgctggcttggggagcccatcaaagcagccattctccccactagcattttcctgaccaataagaagggatttcctgttcttttcaagatgcaccagaggctcatcttccggctcctcaagttggaggtgcagttcatcatcacaggcaccaaccaccactcagagaaggagttctgctcctacctccaatacctggaatacttaagccagaaccgtcctccacctaatgcctatgaactctttgccaagggctatgaagactatctgcagtccccgcttcagccactgatggacaatctggaatctcagacatatgaagtgtttgaaaaggaccccatcaaatactctcagtaccagcaggccatctataaatgtctgctagaccgagtaccagaagaggagaaggataccaatgtccaggtactgatggtgctgggagcaggacggggacccctggtgaacgcttccctgcgggcagccaagcaggccgaccggcggataaagctgtatgctgtggagaaaaacccaaatgccgtggtgacgctagagaactggcagtttgaagaatggggaagccaagtgaccgtagtctcatcagacatgagggaatgggtggctccagagaaagcagacatcattgtcagtgagcttctgggctcatttgctgacaatgaattgtcgcctgagtgcctggatggagcccagcacttcctaaaagatgatggtgtgagcatccccggggagtacacttcctttctggctcccatctcttcctccaagctgtacaatgaggtccgagcctgtagggagaaggaccgtgaccctgaggcccagtttgagatgccttatgtggtacggctgcacaacttccaccagctctctgcaccccagccctgtttcaccttcagccatcccaacagagatcctatgattgacaacaaccgctattgcaccttggaatttcctgtggaggtgaacacagtactacatggctttgcggtctactttgagactgtgctttatcaggacatcactctgagtatccgtccagagactcactctcctgggatgttctcatggtttcccatcctcttccctattaagcagcccataacggtacgtgaaggccaaaccatctgtgtgcgtttctggcgatgcagcaattccaagaaggtgtggtatgagtgggctgtgacagcaccagtctgttctgctattcataaccccacaggccgctcatataccattggcctctagccctgcgtgccaagtgtccagagccttggaagcagcttcaggttctgctcctgtagtacagaaggtgcagtacatctatggg

SEQ ID NO: 353 - DNA, 1192 bp, Homo sapiens
ggctccctccggccgcgaactgcccctccccgccccgcctcccggcgcgggtggccgaggcgtagcgccgcgacccccgcacccctgcgaacatggcgctgcgagtggtgcggagcgtgcgggccctgctctgcaccctgcgcgcggtcccgttacccgccgcgccctgcccgccgaggccctggcagctgggggtgggcgccgtccgtacgctgcgcactggacccgctctgctctcggtgcgtaaattcacagagaaacacgaatgggtaacaacagaaaatggcattggaacagtgggaatcagcaattttgcacaggaagcgttgggagatgttgtttattgtagtctccctgaagttgggacaaaattgaacaaacaagatgagtttggtgctttggaaagtgtgaaagctgctagtgaactatattctcctttatcaggagaagtaactgaaattaatgaagctcttgcagaaaatccaggacttgtaaacaaatcttgttatgaagatggttggctgatcaagatgacactgagtaacccttcagaactagatgaacttatgagtgaagaagcatatgagaaatacataaaatctattgaggagtgaaaatggaactcctaaataaactagtatgaaataacgaagccagcagagttgtcttaaattagtggtggatagagacttagaatagaaacttttagtattaccgatggggcaaaaaaaaactactgttaacactgctaatgaaagaaaatgccctttaactttgtaatgattatagataaatataatatgcgtctttttcacaatatcctatgatttttagactaggctctagtgttcagaattcatgaaattatccatggtaaaaactagttataaaaattacataattcaaagataacattgttattcttaagccttatataatattgtaacttgcatgtatccatacctggatttgggatgaaatacttaatgatctttccattggaaataactggaagtgaagaggttttgttgcttgtacagtgtcagatgaggaacaccactatcttaattttgcgatacactgcatttgctggtgctatttttatacagtgaagcaacagctttgcagcaaaataataaaatacttcttcgttaaaaaaaaaaaaaaaaaaaaaaaaaaaaaaaaaaaaaaa

SEQ ID NO: 354 - DNA, 1311 bp, Homo sapiens
acctcctgtggccagggcttctatgggctgtggcttatgtctcatgtgtcattctccagggaagcgccgccgagctgctatggacttccctggagccaaggtcattgttccccagctgaagggcagggtgcagcggaggcgtgtggggttgatgtgtgagggggcccccatgcgggcacacagtcccatcctgaacatggagggtaccaagattggtaggtggaccagggaagctgggaaacccttgtctcttcccaggagggtgggggcactggcagggtggtgctgatgcgtggcttatgcttgcttgacaggtactgtgactagtggctgcccctccccctctctgaagaagaatgtggcgatgggttatgtgccctgcgagtacagtcgtccagggacaatgctgctggtagaggtgcggcggaagcagcagatggctgtagtcagcaagatgccctttgtgcccacaaactactataccctcaagtgaagctggctcagggtggggctgtcccttccaggagttttgcccctacaaggggttagtcaagaagctgaggcagaactcactgggggtgggcagttaaggtggaggctgattctaattgtctggttgaggggccacaccacctattccccccacctaactcatgccattccagcttccttcaggaccctgcttctgagtgacggaccagctcacacaatgtcttgtttcagtccatgatcccactgacctactcttgcctgctggagggtaatgagaagctttggttctgccatctctcccactctgccaggtgctggctgtggagcaaaggctcacctttgtggagaggataaaacctkcccaacctacctcaccatggtttttcacattgcaaagggtaataacatgggcagtgcggacttaggctaccccctccagtttgctttccgtaaatgcaaattgtccttactgcaagtcaggaatgattgctgactcacagtagggctgctatgcctgtgtgtaaacttggggatggctgagggaacatagactcactcttccacattcccaagttggtctagtgtgctgcccagtagcaaaccatggcagactcaccacctattctgagttccagggctgctgtagggcagggtgggcttcctcccagacttgccttaccctgggctgatctttgcccctggtatgcattaatggactccactgaatcctgaaaaaaaaattaaacttccttcttacttgccagtctctagcttcattgttctctgttcacagggttcctgaaatgccaacccaatgcc

SEQ ID NO: 355 - DNA, 1875 bp, Homo sapiens; identical to SEQ ID NO: 110

SEQ ID NO: 356 - DNA, 792 bp, Homo sapiens
ggagttgcgcgggctgacgcgccactatgtagcgggtttcgggcgggccacgcgtgcgggacaggaacccaaccccagccgaccttgagctccaggagttcgtctcttacgtctgcggaagtgcagctgcctcagttcttagcgcaggttgacaactacaggcacaagccattgaagctggaatgtcctgttgctggtatttcaattgacttaagccaactatcccttcagttacaataggaaagtgcctctaataaggccaaatatgcgtactaacttgtagcaaccacgtgtccgtgcagtgccacaggagctagagcagtgacaatgctggtggcaacagggcagtgtagcaggtgcttcatgttcaccttttcaaccttttcatttaattgtcacaactcggaggtggattctgttagggacaggctgccccaggaccactccgcccccgctaactcaatgcagctgacccttaccctgaatactctgcagctgcattcctgaaccgttatctaggcgctatagcaaggtcaccagacttgctacaccgaagccctctgggtggcacgggggaggtcatgagaaacgtggattacacccccttgtaaattcctattttcacaagataatatattgtaagccggtcatgagattatatgtggtaaagttaattgactaacaaccccagggtctctctcccccatataaacccctcattttgtaagctcagggctgccacctccgactggtggagaagcctggcaggttaataaacttacttggcctgac

SEQ ID NO: 357 - DNA, 4654 bp, Homo sapiens
agtaattgctgtaccaaggtcagaatcgccacctgaggcctgaatatcagcgtaagatagtgtccaaagcagtcttaagaagaggtcccattaccccactctttccgccctaatggaggtctccagtttagcctcacagcatggaaccacaggttactctaaatgtgacttttaaaaatgaaattcaaagctttctggtttctgatccagaaaatacaacttgggctgatatcgaagctatggtaaaagtttcatttgatctgaatactattcaaataaaatacctggatgaggaaaatgaagaggtatccatcaacagtcaaggagaatatgaagaagcgcttaagatggcagttaaacagggaaaccaactgcagatgcaagtccacgaagggcaccatgtcgttgatgaagccccacccccagttgtaggagcaaaacgactagctgccagggcagggaagaagccacttgcacattactcttcactggtgagagtcttgggatcagacatgaagaccccagaggatcctgcagtgcagtcgtttccacttgttccatgtgacacagaccagcctcaagacaagcccccagactggttcacaagctacctggagacgttcagagaacaagtggttaacgaaacggttgagaagcttgaacagaaattacatgaaaagcttgtcctccagaacccatccttgggttcttgtccctcagaagtctcaatgcctacttcagaagaaacattgtttttgccagaaaaccagttcagctggcatattgcttgcaacaactgccaaagaaggattgttggtgtccgctaccagtgtagcctatgcccatcctacaatatctgtgaagattgtgaagcagggccatatggccatgacactaaccacgtcctgctgaagttgcggagacctgttgtgggctcctctgaaccgttctgtcactcaaagtactctactcctcgtcttcctgctgctctggaacaagtcaggctccagaaacaggttgataagaactttcttaaagcagaaaagcaaaggttgcgagctgagaagaaacaacgtaaagcagaggtcaaggaacttaaaaagcagcttaaactccataggaaaattcacctgtggaattcaatccatggactccagagccccaagtctcctttaggccgacctgagagcttgctccagtctaataccctgatgctccctttgcagccctgtacctccgttatgccaatgctcagtgcagcatttgtggatgagaatttgcctgatgggactcaccttcagccaggaaccaagtttatcaaacactggaggatgaaaaatacaggaaatgtaaagtggagtgcagacacaaagctcaagttcatgtggggaaacctgactttggcttccacagaaaagaaggatgttttggttccctgcctcaaggccggccatgtgggagttgtatctgtggagttcattgccccagccttggagggaacgtatacttcccattggcgtctttctcacaaaggccagcaatttgggcctcgggtctggtgcagtatcatagtagatcctttcccctccgaagagagccctgataacattgaaaagggcatgatcagctcaagcaaaactgatgatctcacctgccagcaagaggaaacttttcttctggctaaagaagaaagacagcttggtgaagtgactgagcagacagaagggacagcagcctgcatcccacagaaggcaaaaaatgttgccagtgagagggagctctacatcccatctgtggatcttctgactgcccaggacctgctgtcctttgagctgttggatataaacattgttcaagagttggagagagtgccccacaacacccctgtggatgtgactccctgcatgtctcctctgccacatgacagtcctttaatagagaagccaggcttggggcagatagaggaagagaatgaaggggcaggatttaaagcacttcctgattctatggtgtcagtaaagaggaaggctgagaacattgcttctgtggaggaagcagaagaagacctgagtgggacccagtttgtgtgtgagacagtaatccgatcccttaccttggatgctgccccagaccacaaccctccttgcagacagaagtccttgcagatgacatttgccttgcctgaaggaccacttggaaatgagaaggaggagattatccatatcgctgaggaagaagctgtcatggaggaggaggaggatgaggaggatgaggaggaggaggatgagctcaaagatgaagttcaaagtcagtcctctgcttcctcagaggattacatcatcatcctgcctgagtgctttgataccagccgccccctgggggattctatgtacagctctgcgctctcacagccaggcctggagcgaggtgctgaaggcaagcctggggttgaggctgggcaggaaccagctgaggctggggaaagactccctggaggggagaaccagccacaggagcacagcataagtgacatcctcacgacctcacagactctggaaacagtgcccctaatcccagaggtagtggagcttccaccgtcactgcccaggagctctccttgtgtacatcatcatggttccccaggagtggatttaccagttaccataccagaagtttcttcagtccctgatcagatcagaggagagcccagaggctcatcaggacttgtaaacagcagacagaagagctatgaccactcaaggcaccatcatgggagcagcattgctggaggactggtgaagggggctttgtctgttgctgcctctgcatacaaggccctgtttgctgggccaccagtcactgcacagccaataatttctgaagatcagacagcagccctgatggcccatctctttgaaatgggattctgtgacaggcagctgaacctacggctgctgaagaaacacaattacaatatcctgcaggttgtgacagaacttcttcagttaaacaacaacgactggtacagccaacgctattgaggagtgaccttgtattaaataactgcctgctgctcagagatgatctttattctgtcattggggtatgggatagaagcccttgcttatttttaatctgatgaatctgtatagagcccatcgttgagttaccaagacaatacctgctacagtattttggggagcaaactaaagaccagaacttaaattttcactttagacattggatgaatagtatgaagacagtttttcagttgatttggataaaactattttagtgcattgacaagtgtaacttcaacttcatatagaaccatttttctttctgcttttattgaaactgagtatttttctttggctaatgtggattttttatggggatatctgttaattttcaggttttgaaagacattaacctcggaagttgtttttaagaattattctcataattcttattctcataatttctgtaatccacctcaagcttcatagttatttggcattgaaataacacccagagcatgatagaaatgttgttactcttcctctctcaaggagaaagtaattttcctgcaatacttaataattggcaccgttgctttctaaagactccatggtgcattcaagagtatccaacttcaagggaatctccgcatttcaatgaaaggaggaagagtgtgctgataaacctaccagcacctattgagcaatgtctattatagtaattttgcatacatttttatttaagggaaaaaatataggtattgtgaaatattttgctaatcttatagaaaaggaaaaaatcccgttatttaaagggaaaagtaaatttaacagttgccttttttcttaatgtcagggcagatcttattttacagtacagtgggggaaatagaaaacatgtgaaaggcaaaaggcaggctcctaaattaatgtcagtgaagttcagggtgggcaaatgagtgtgtgtgaggtataggaaatgctgatgacttctttaatgcttgaagtccgttcacaggtatctagccctagaatgcctagaacaggaagaggcagctggtgttctgcaaaacttggacaggggcaaagttgctgaaaaagttttggtttaacccgaagataagtggaaaagagcttgtccatgaacccaggttctcactctgtttacagaagtgtgttgagtacagttggtgaaggaagaggtaacaaaaaatgctaaatattttatccatgaaaatgacttccagaaaaggaagaatatgaaccccagaccgaaggggaaaagatagttaatagtattatctaacctggttggtatttgtaatgaatggtgattttaattagtcattagccataatgatgtttatttacagtataactcctgaatgctacttaaataaaccaggattcaaactgcaagccagccaggccgttcattatttaaaacgttttaatcggggcttccgggtagaaggtggagcggcagggtgtaattgggttgatgggtgggacctgtcttgaccatcggagttttataatcgagggccaggagggcccgggttgctctcctggttatgtatgtacttgtacataaccaccttaagaatggtgaaataaatgttcttggaaattcc

SEQ ID NO: 358 - DNA, 4379 bp, Homo sapiens
aggaaactcccagggcccgcccaggacccccaagccgccgcggacgcagcccaggatggcggcccaggtgactctggaggacgcgctgtccaacgtggacctcctggaggagctgcccctgcccgaccagcagccctgcatcgagcccccgccatcctcgctgctctaccagccaaatttcaacactaactttgaagacagaaatgcatttgttactggcatcgcaagatacattgaacaagccaccgtccactctagcatgaacgagatgctggaggagggccaagaatatgctgtcatgctgtacacctggaggagctgctcccgggccatcccacaggtgaaatgtaacgagcagcctaacagagtggaaatctacgagaaaaccgtggaggttctggagcctgaggtcacaaaactgatgaatttcatgtacttccagagaaatgccattgagcgtttctgcggggaagtgaggcgcctgtgccatgccgagaggaggaaggacttcgtgtcagaagcctacctgatcacactgggcaaattcatcaacatgttcgctgtgctggacgagctgaagaacatgaagtgcagtgtgaagaacgaccactcagcgtacaagagggccgctcagtttttacgtaaaatggcagatccacagtccatccaggaatcgcagaatctgtccatgttcctggccaatcataacaagatcacacagtctctgcagcagcagctcgaagtgatttctggctacgaagagctcctggcagatattgtgaatctgtgtgtggattactacgagaacaggatgtatttgacgcccagtgagaaacacatgcttctcaaagtcatgggatttggtctgtacctgatggatgggagtgtcagtaacatctataagttggatgccaagaaaagaataaacttatccaaaatcgacaagtacttcaagcaactccaggtggttccgctatttggggacatgcaaatagaactggcaagatatatcaagaccagcgcccactacgaggaaaataaatctcgatggacgtgcacatcctccggcagcagccctcagtacaacatctgcgagcagatgatccagatccgcgaggaccacatgcgcttcatttcggagctggcgcgctacagcaacagcgaggtggtcacgggctcgggccgccaggaggcccagaagacggacgcggagtaccgcaagctcttcgacctggcgctgcagggcctgcagctgttgtcgcagtggagcgcgcacgtgatggaagtgtattcctggaagcttgtgcaccccaccgacaagtactccaacaaggactgccccgacagcgctgaagagtacgagcgtgccacgcgctacaactacaccagcgaggagaagtttgccctagtggaggtgatcgccatgatcaaaggcctgcaggtgctgatgggcaggatggagagcgtgttcaaccacgccatccggcacaccgtctatgccgcactgcaggacttctcccaggtgacccttagggagccgctgcggcaggccatcaagaagaagaagaacgtcatccagagtgtcctgcaggccatcaggaagaccgtgtgtgactgggagacggggcatgagcccttcaatgacccagccttgcggggcgagaaggaccccaagagcggcttcgacataaaagtaccacgccgcgccgtgggaccctccagcactcagctttacatggtgagaaccatgctagagtccctcattgcagacaaaagtggttccaagaaaaccttgagaagtagccttgaggggcccaccatattggacatagaaaaatttcatcgagagtcattcttctacactcacttgataaatttcagtgaaacgctgcagcagtgctgtgacctttcgcagctgtggttccgagagttcttcctggagctgaccatgggcaggaggatccagttccccattgagatgtcgatgccctggatcctgacggaccacatcctggagaccaaggaggcatcgatgatggagtacgtgctctactccctggacctgtacaatgacagcgcccactacgcgctcaccaggttcaacaagcagttcctgtacgacgaaattgaggccgaggtgaatctatgttttgaccaatttgtttacaagctagcagaccagatatttgcctattataaggttatggcaggaagtttgcttcttgataaacggttacgatcagaatgcaagaatcagggagccacgatccacctcccgccgtctaaccgctacgagacgctgctgaagcagaggcatgtgcagctcctcggcagatcaatagacctcaatcgtctgatcacccagcgcgtctcagcagccatgtataagtccctagaactggcgattggacgatttgaaagtgaagatttgacctccatagttgagctggatggcctgttggaaatcaaccgcatgacccacaagctgctgagccggtacctgacgctggacggcttcgacgccatgttccgggaggccaaccacaacgtgtcagcgccctacgggaggatcaccctgcacgtcttctgggagctcaactatgacttcctgcccaactactgctacaacggctctaccaaccggtttgttcggacagtgttaccattttctcaggaatttcaaagagataagcagcctaatgcacagcctcagtatctgcatggatccaaggctttgaacttggcctactccagcatttacggcagctaccggaacttcgtgggacctccacactttcaagtcatctgccggcttctcggctaccagggtatcgccgtggtcatggaggagctgctgaaggtcgtcaagagcctgctgcaaggcacaatcctgcagtacgtgaagacgctgatggaggtgatgcccaagatctgccgcctgccccggcacgagtacggctctcctggtatcctggagttcttccaccaccagctgaaggacatcgtggagtacgcagagctgaagacggtgtgcttccagaacctgcgggaggtggggaacgccatcctcttctgcctgctcatcgagcagagcctgtctttagaagaagtgtgtgacctgctgcacgcggctcctttccagaacatcttgccgcgagtccatgtgaaagagggggagagacttgatgccaaaatgaaaagactagaatcaaagtacgccccgctgcatcttgtcccactgattgaaagactggggacccctcagcaaattgccatcgcaagagagggggacctgctgacaaaggagcgcctctgctgcggcctgtccatgtttgaggtcatcctgacacggatccggagctttctggatgaccccatctggcgcgggcctctgcccagcaatggggtcatgcatgtggacgagtgtgtggagtttcacagactgtggagtgccatgcagtttgtctactgcattcccgtggggacacacgagttcacagtcgagcagtgctttggtgatgggctacactgggctggctgtatgatcatcgtacttcttgggcagcagcggcgttttgctgtgctggatttctgctaccatctacttaaagtccagaaacatgatggcaaagatgagattattaaaaatgtgcctttgaagaagatggtggagagaattcgcaagttccagattctcaatgatgagatcatcaccatcctggataagtacctgaagtcaggcgacggggagggcacgccagtggagcatgtgcgctgcttccagccgcccatccaccagtccctcgccagcagctgagggcacgcgctgcactccgtaactcaacatggcatgcctttctctccgtaaactatttagtgagatttttagggactatttttcagtatctctgtacctgttaaagggggtgcttttcgatctaaaaacttaattttataaaattgacttatttttctagactaaaattgtatatgcttttggtaattaggaactcttgagaatattggctgctgattgttgccatcacgttcctacaaaattgtttttctatgggatgttctggcagctgtgtcataaaatgctgctgggttcattcattcattccataagaaacttaataccagcaaatgcattaaatcccttgccagttaccattaactataactatttagcttttgtttagggatctttctgatgggcttttatgagcaatcttagttctaagtcattgttcccatcccttttttgtgtgtttcagaaaatagtgaacttgattcccctgcttccactaaatccagttgtgacaaaatctaacgtgacatcagatcgaaaggttatagaaataaaactaatgagatct

SEQ ID NO: 359 - DNA, 4565 bp, Homo sapiens; identical to SEQ ID NO: 112

SEQ ID NO: 360 - DNA, 5319 bp, Homo sapiens
gaagatcggggggctgaaatccatcttcatcctaccgctccgcccgtgttggtggaatgagcgttgcatgtgtcttgaagagaaaagcagtgctttggcaggactctttcagcccccacctgaaacatcaccctcaagaaccagctaatcccaacatgcctgttgttttgacatctggaacagggtcgcaagcgcagccacaaccagctgcaaatcaggctcttgcagctgggactcactccagccctgtcccaggatctataggagttgcaggccgttcccaggacgacgctatggtggactacttctttcagaggcagcatggtgagcagcttgggggaggaggaagtggaggaggcggctataataatagcaaacatcgatggcctactggggataacattcatgcagaacatcaggtgcgttccatggatgaactgaatcatgattttcaagcacttgctctggagggaagagcgatgggagagcagctcttgccaggtaaaaagttttgggaaacagatgaatccagcaaagatggaccaaaaggaatattcctgggtgatcaatggcgagacagtgcctggggaacatcagatcattcagtttcccagccaatcatggtgcagagaagacctggtcagagtttccatgtgaacagtgaggtcaattctgtactgtccccacgatcggagagtgggggactaggcgttagcatggtggagtatgtgttgagctcatccccgggcgattcctgtctaagaaaaggaggatttggcccaagggatgcagacagtgatgaaaacgacaaaggtgaaaagaagaacaagggtacgtttgatggagataagctaggagatttgaaggaggagggtgatgtgatggacaagaccaatggtttaccagtgcagaatgggattgatgcagacgtcaaagattttagccgtacccctggtaattgccagaactctgctaatgaagtggatcttctgggtccaaaccagaatggttctgagggcttagcccagctgaccagcaccaatggtgccaagcctgtggaggatttctccaacatggagtcccagagtgtccccttggaccccatggaacatgtgggcatggagcctcttcagtttgattattcaggcacgcaggtacctgtggactcagcagcagcaactgtgggactttttgactacaattctcaacaacagctgttccaaagacctaatgcgcttgctgtccagcagttgacagctgctcagcagcagcagtatgcactggcagctgctcatcagccgcacatcggtttagctcccgctgcgtttgtccccaatccatacatcatcagcgctgctcccccagggacggacccctacacagctggattggctgcagcagcgacactaggcccagctgtggtccctcaccagtattatggagttactccctggggagtctaccctgccagtcttttccagcagcaagctgccgctgccgctgcagcaactaattcagctaatcaacagaccaccccacaggctcagcaaggacagcagcaggttctccgtggaggagccagccaacgtcctttgaccccaaaccagaaccagcagggacagcaaacggatccccttgtggcagctgcagcagtgaattctgcccttgcatttggacaaggtctggcagcaggcatgccaggttatccggtgttggctcctgctgcttactatgaccaaactggtgcccttgtagtgaatgcaggcgcgagaaatggtcttggagctcctgttcgacttgtagctcctgccccagtcatcattagttcctcagctgcacaagcagctgttgcagcagccgcagcttcagcaaatggagcagctggtggtcttgctggaacaacaaatggaccatttcgccctttaggaacacagcagcctcagccccagccccagcagcagcccaataacaacctggcatccagttctttctacggcaacaactctctgaacagcaattcacagagcagctccctcttctcccagggctctgcccagcctgccaacacatccttgggattcggaagtagcagttctctcggcgccaccctgggatccgcccttggagggtttggaacagcagttgcaaactccaacactggcagtggctcccgccgtgactccctgactggcagcagtgacctttataagaggacatcgagcagcttgacccccattggacacagtttttataacggccttagcttttcctcctctcctggacccgtgggcatgcctctccctagtcagggaccaggacattcacagacaccacctccttccctctcttcacatggatcctcttcaagcttaaacctgggaggactcacgaatggcagtggaagatacatctctgctgctccaggcgctgaagccaagtaccgcagtgcaagcagcgcctccagcctcttcagcccgagcagcactcttttctcttcctctcgtttgcgatatggaatgtctgatgtcatgccttctggcaggagcaggcttttggaagattttcgaaacaaccggtaccccaatttacaactgcgggagattgctggacatataatggaattttcccaagaccagcatgggtccagattcattcagctgaaactggagcgtgccacaccagctgagcgccagcttgtcttcaatgaaatcctccaggctgcctaccaactcatggtggatgtgtttggtaattacgtcattcagaagttctttgaatttggcagtcttgaacagaagctggctttggcagaacggattcgaggccacgtcctgtcattggcactacagatgtatggctgccgtgttatccagaaagctcttgagtttattccttcagaccagcagaatgagatggttcgggaactagatggccatgtcttgaagtgtgtgaaagatcagaatggcaatcacgtggttcagaaatgcattgaatgtgtacagccccagtctttgcaatttatcatcgatgcgtttaagggacaggtatttgccttatccacacatccttatggctgccgagtgattcagagaatcctggagcactgtctccctgaccagacactccctattttagaggagcttcaccagcacacagagcagcttgtacaggatcaatatggaaattatgtaatccaacatgtactggagcacggtcgtcctgaggataaaagcaaaattgtagcagaaatccgaggcaatgtacttgtattgagtcagcacaaatttgcaagcaatgttgtggagaagtgtgttactcacgcctcacgtacggagcgcgctgtgctcatcgatgaggtgtgcaccatgaacgacggtccccacagtgccttatacaccatgatgaaggaccagtatgccaactacgtggtccagaagatgattgacgtggcggagccaggccagcggaagatcgtcatgcataagatccggccccacatcgcaactcttcgtaagtacacctatggcaagcacattctggccaagctggagaagtactacatgaagaacggtgttgacttagggcccatctgtggcccccctaatggtatcatctgaggcagtgtcacccgctgttccctcattcccgctgacctcactggcccactggcaaatccaaccagcaaccagaaatgttctagtgtagagtctgagacgggcaagtggttgctccaggattactccctcctccaaaaaaggaatcaaatccacgagtggaaaagcctttgtaaatttaattttattacacataacatgtactattttttttaattgactaattgccctgctgttttactggtgtataggatacttgtacataggtaaccaatgtacatgggaggccacatattttgttcactgttgtatctatatttcacatgtggaaactttcagggtggttggtttaacaaaaaaaaaaagctttaaaaaaaaaagaaaaaaaggaaaaggtttttagctcatttgcctggccggcaagttttgcaaatagctcttccccacctcctcattttagtaaaaaacaaacaaaaacaaaaaaacctgagaagtttgaattgtagttaaatgaccccaaactggcatttaacactgtttataaaaaatatatatatatatatatatatataatgaaaaaggtttcagagttgctaaagcttcagtttgtgacattaagtttatgaaattctaaaaaatgccttttttggagactatattatgctgaagaaggctgttcgtgaggaggagatgcgagcacccagaacgtcttttgaggctgggcgggtgtgattgtttactgcctactggatttttttctattaacattgaaaggtaaaatctgattatttagcatgagaaaaaaaatccaactctgcttttggtcttgcttctataaatatatagtgtatacttggtgtagactttgcatatatacaaatttgtagtattttcttgttttgatgtctaatctgtatctataatgtaccctagtagtcgaacatacttttgattgtacaattgtacatttgtatacctgtaatgtaaatgtggagaagtttgaatcaacataaacacgttttttggtaagaaaagagaattagccagccctgtgcattcagtgtatattctcaccttttatggtcgtagcatatagtgttgtatattgtaaattgtaatttcaaccagaagtaaatttttttgttttgaaggaataaatgttctttatacagcctagttaatgtttaaaaagaaaaaaatagcttggttttatttgtcatctagtctcaagtatagcgagattctttctaaatgttattcaagattgagttctcactagtgtttttttaatcctaaaaaagtaatgttttgattttgtgacagtcaaaaggacgtgcaaaagtctagccttgcccgagctttccttacaatcagagcccctctcaccttgtaaagtgtgaatcgcccttcccttttgtacagaagatgaactgtattttgcattttgtctacttgtaagtgaatgtaacatactgtcaattttccttgtttgaatatagaattgtaacactacacggtgtacatttccagagccttgtgtatatttccaatgaacttttttgcaagcacacttgtaaccatatgtgtataattaacaaacctgtgtatgcttatgcctgggcaactattttttgtaactcttgtgtagattgtctctaaacaatgtgtgatctttattttgaaaaatacagaactttggaatctg

SEQ ID NO: 361 - DNA, 419 bp, Homo sapiens
ctcttgacgactccacagataccccgaagccatggcaagcaagggcttgcaggacctgaagcaacaggtggaggggaccgcccaggaagccgtgtcagcggccggagcggcagctcagcaagtggtggaccaggccacagaggcggggcagaaagccatggaccagctggccaagaccacccaggaaaccatcgacaagactgctaaccaggcctctgacaccttctctgggatcgggaaaaaattcggcctcctgaaatgacagcagggagacttgggtcggcctcctgaaatgatagcagggagacttgggtgaccccccttccaggcgccatctagcacagcctggccctgatctccgggcagccaccacctcctcggtctgccccctcattaaaattcacgttcccaccctgaaa

SEQ ID NO: 362 - DNA, 6322 bp, Homo sapiens
ctgagagcgacatgtccccggcggctcaggcggagcggcccgtggcgctgtttttctgagtccggggtggcctggcagccggccgaggacgagggtcggcgggggctgcccccgtggtggtggccgccatgctgggagcctgggcggttgagggaaccgctgtggcgctcctgcgactgctgctgctgctgctgccgccggcgatccggggacccgggctcggcgtggccggcgtggccggcgcggcgggggccgggctgcccgagagcgtcatttgggcggtcaacgcgggtggagaggcgcatgtggacgtgcacgggatccacttccgcaaggaccctttggaaggccgggtgggccgagcctcagactatggcatgaaactgccaatcctgcgttccaaccctgaggaccagatcctgtatcaaactgagcggtacaatgaggagacctttggctacgaagtgcccatcaaagaggagggggactacgtgctggtcttgaaatttgcagaggtctactttgcacagtcccagcaaaaggtatttgatgtacgattgaatggccacgtcgtggtgaaggacttggatatctttgatcgtgttgggcatagcacagctcacgatgaaattatacctatgagcatcagaaaggggaagctgagtgtccagggggaggtgtccaccttcacagggaaactctacattgagtttgtcaaggggtactatgacaatcccaaggtctgtgcactctacatcatggctgggacagtggatgatgtaccaaagcttcagcctcatccgggattggagaagaaagaagaggaagaagaagaagaagaatatgatgaagggtctaatctcaaaaaacagaccaataagaaccgggtgcagtcaggcccccgcacacccaacccctatgcctcggacaacagcagcctcatgtttcccatcctggtggccttcggagtcttcattccaaccctcttctgcctctgccggttgtgagaacaaatgactatcctgaacagggtggaggggtgtgggaaagaaaccagccatattggttttggtttctgtatttttcacaatgattaatgaacaaaaacaaagagaaaaaaaacacacatcaattaaaggagacaaaaagaggcagagcgagtagagagcagccctcattcaccacctggtcccagacgtgcttcagtcctcgtcctctctttgtggctggctcccagccttctctttcctcttgaggatacttagggtaaactggatccttcctgctcaaggatcctcatttgtatacctagtggaaaggactctgaactcagaggagtcactgttcctttttttaggttagaaattaacagcagggaaatgccatcttattacctgagacgaccagcactgggagttaggtacggtctgaagttatgtctagataagacttcagacgtcctgggattgaaagaatgtgtgtgaaggggtagaatttgtgcggtaaagacttaaaaaaaaaagtagggagattaaaaaaaaagaaagaaaatgcttccttatctggaagcctttctggattaatccagtgatggtcccacctttagtgtttgagctttgtcattgcttgtctccctggcatgtgccagttatagactgtccagcatccaagacgtttcggttatgtcgggtcctcagatcgcctctgacttgttaccacaacaaatcattttgatttcagtgcctgttggggacttgatttcttctcaggttttgtttgtttgtttgtttccttaatctggctcatttgaaatttcttctccctctcaaccatcccactaagttatagccaagaagggaaggagacacggggatttggggttctctgcttgaatgtcttctcctttaccacctcaccttgttggtacctccctccctggatctctgagccagcagccaggaggacctgacccagcagttctttactggcccctttgtagggccttgctgccagggggcagggatgctttccagcctgcagcaacagaacacttgaccttaaaagtctcttctggtctttggattagaaaaggcttatgttagcatagcttaagagcaacctcagagacttgagccctactaagtgactgaccactgtttagagtgtctggtatctgatgttcatttattcccatgttcttgtgtgtcacagttcagccagttttggtttatgcctagagctacttcaaggaactagactaattagctatataggcccagcgatgcttcttattgatcttaatagtatgcccttccttcccctgtcctttcatttctctatccaagtagcagtcaggttcttggtgtgatgggactgaaagaattccagtcagccagagccttggcagctctgaagctaaccttagcatctaagtgtcgatcttgaattccctgaaaaaatttctataggaaatgaagcttccctggtcccctcctttctggccattgtcatccatttcccagttagggcaacaatgaaggaggacccagccaagctagaaggaattttgtggatgggagacagcaggattagcttcagcttgggctggagcagtcaatataggatctcaggccaggcccgcttttctagaatgtgtttaattttgagtttgctttattagatatgttttttaagagctctgtatatttgaactgctccttatgtgacaaaataggtagctcttgggctcatgtcctgggttttggctctttaatgattactccaggccagcatttagtcgtttgagaattgtagcctgttgttttcgctgtgacttgggtctcagtgctagggtattgagtcaggcagctggagggttgtggcccgaggctgcagtcagaggtatacttcccatagtgcttcacacagctcccctgcttctaaaggataaggtactgtagccttggtcctggggaccacctgcctggggcagtggacatcctaactaaacaggcttctggcagtagctttggttcctatcccatcgaaattccccaaagccctgggccactgccattgggttagtcaagatgaaggaggaggactggctgcctccattttgccttgtttgttagtttgcctgggtctgtctgaggaaggagggggtcccgccttccacctcaacacatcccttcagtgactcagagtctcagaaggaaaccctgactcctggggccatttcctaatggtactgtaagccaagcagctttgcttctgcctctgtttccaagcccacccttttcccctgagctcagggttagggatgggcgctttcctctctggttgtgaacgaaaggaaggaacatctttctatggctaacaaaaactaaaggggaagtgaggaaacaggaagaagtatggtgggggctggggtagactcccctggagccaagcctatccagctaacaagagctccctggggctggtcacagctggctcatgatgctgaacttgaaagtttttttgtttttgtttttgttttgtggctcctccaagatataggtacatgaagtttaggttaaaggggtgggattctttatttttatttttgtattgtatgtgtcaagaattactctgttgttcaccttttgctttttgcactgtttgttctcttatctgtattttgagcttagtgctaggactgagaggctgcaccatagggaatgtatgggagatggtgaggggtgccagtgaggggtgcgtggaggagaggcctgggctcctctactggatctacactctgtcccaggtttttagatcccactgagcccagctgactgaaaacaaggacagtcagggtgaaacttcttttgccagaagtgtggcctgagttgaatttctgggaggatgacgcagatgtctgctgcagagctgggctgagagttctgcagtctagctctgacttaggtcaggggcctgttggtctctcattggacgtttttgggtctcactcatgcttactgaaacattgtgccaagaaactctgtgggatttgtgtcccttaaaccagactcacttttctgaaaaatctccattgttgaggagaggctgctcaatcgacaccccgagttctcatgactgggaagatagttttcttcaggtgtcaatggcgttagactcccaggaagactagccctgcccacagggccacctgttggtttgagagcgtgttcgtgttctcttgccctccctgcctaagagctactgggatcacgttagcgggcatttaggctttgatgagagggcacagtttgagttaggtttacctccccctttctgtgcctgggaactgtttggtccagctttagaactgtggttttgacttccttatctcttgggagaagcttctgttttaaggaatttctcttccttcttctcctgcctctagcctctcctggaaaggcctggatatggtttctaaaatctcagctgagaacttcagaaaacagcagcagtattttccttttcctagtgctaaaatccctttccctagaaattggctcaccttgggaaacccagggaaagaatcagcaggttctctgccctccctaggggttggggaaggacccaccccggtcagcacagtgccttttcctctcctgctctgagccagggtggggcattccctctagattcaggtttgggcaggggtcctatagtccctgccatggggctgcttccctgtcccttccctcccctttgctggcctactctggcataattcaagtgtcttcttgccttggggatccttagtggcatcaaatggcaacatggaatattgtcctccatgcccctccagaaggacctaggagagtaggtgagctttccaaagtgagagacgaatctttctttctttttttttttaaagggcaggatgggtatgctttgggctttctccttctgtggccccggaggaaggagagactgaggcaaggcaaagtgatagtacactgaagcagaaccggaaacacccaggaactgttcagaaatctcagaagaaatctgcttctcttcgatggaaagatataattaacgatcaaagagctctaagaaaattgcaaagaagccttaatgttcaagctttagaaagatcagagcaatttttctctttcagtccaaactaagactctctgtatttaaatctctctggggcaagagggctagatttcctcattttgttatgagactagattggtaccagtagatcagctgcctagcgagggcaggtttcttctttgcatctgtgtggcttgcttccagtctggcctgtcctttccagctgccttttgtctagcctgctatggggggccagattatcttgataagagcaggtgatttggggactagctgggttggtaggaaaagagcaggatggatctcttgggacaggttcccccaggagtataaacacaaggagccaggattgtcctggcagccaaggaaacagtagtgcctgtttgagttggcagagagggccttggcacctcttgcatccaggcagtcttgtgagatgggggcacatagcactggggaaagcagaactccattctcacctctattttgagcttcagtgctttatttcagtatgaggaaaaacaacaacaaactgaagtgcgctttccgtcctttcaaaggacaactgtcgggaagggagagccgagttgcgaggtaggaggggagcactggcagggagagacattcttgactcctctcttccctggtgtgttgtgatccagggaatgaaaagaaatttgaccctggattggttctctccttggacttaaggaatcttaccttttccttccacaaagttctcccaggcaaggaccagctgcccattctgagcccagggcagcctcttcaaccattattggtctaacctggcttgtcaggaaaccaagcccacccttccacattgggcctggctgctctattctgtaccaagtactggagaaaaagcatcaagttcttagcccttgtagcttctaccctagtttcccatcctctctctgtggaggccaaaccaactctttgccagcagccacaacatgcattgacagcggcacagtgagatataactgatgggctttgaacctggttggccggggaagctgtaggggtggatagagctggctttccttctgggctgtctccatctgaccctaccccttccatgtcccaccccactcccaccaaaaagtacaaaatcaggatgtttttcactgtccattgctttgtgttttaataaacaatttgcagtgac

SEQ ID NO: 363 - DNA, 1072 bp, Homo sapiens
gaattccgtatagtgaagatgatgtaaatgaattagtgaaggaagatgaagtggatggtgaagagcagacacagaaaacccaagggaaaaaaagaaaggcccagagcattccagccaggaagagaagacaaggtggcctctcattagaagaagaggaagaggaggatgccaattcagaatctgagggaagcagtagtgaggaggaagatgacgctgcagagcaggaaaaaggcattggatcagaggatgccaggaaaaagaaggaggacgaactctgggccagcttcctcaatgatgtgggaccaaaatcaaaagtgcccccaagtacacaagttaagaaaggagaggagactgaagagacaagttcaagtaaattgttggtaaaagcagaagagctagagaaacctaaagaaacagaaaaagttaaaatcaccaaggtgtttgattttgctggtgaagaagtaagggtaactaaggaagtggatgctacatctaaagaggccaaatccttcttcaagcagaatgagaaagaaaaaccacaggctaatgttccttcagctctgccatcactccctgccgggtcagggttaaaaagatcaagtggcatgagcagccttttggggaaaattggtgccaagaagcagaaaatgagcacccttgagaagtccaaactggactgggagagcttcaaggaggaagaggggattggtgaagaactggccatccataatcgagggaaagaggggtacattgaacggaaagccttccttgaccgagtggatcacaggcagtttgaaattgagcgagatctcaggctgagcaaaatgaaaccttgatgttacgggctaaatcaagagcagcttaatcctgtttacaatgtgagctttttgtgcgtctgtgaaatgttttacagtgtttctcatcatctgtttcccagcaaggtcttttttttttctacattgaagttctgtctatgtatcttaatcacaaatggtttcattcactttacttttaaaaatttgtccttaaatgaataaataaaataaaagttggtcctgtgagaggggaattc

SEQ ID NO: 364 - DNA, 2491 bp, Homo sapiens
ggagcggccaacatggcggaacgcaggagacacaagaagcggatccaggaagttggtgaaccatctaaagaagagaaggctgtggccaagtatcttcgattcaactgtccaacaaagtccaccaatatgatgggtcaccgggttgattattttattgcttcaaaagcagtggactgtcttttggattcaaagtgggcaaaggccaagaaaggagaggaagctttatttacaaccagggagtctgtggttgactactgcaacaggcttttaaagaagcagttttttcaccgagccctaaaagtaatgaaaatgaaatatgataaagacataaagaaagaaaaagataaaggaaaagctgaaagtggaaaagaagaagataaaaagagcaagaaagaaaatataaaggatgagaagacaaaaaaagaaaaagagaaaaaaaaagatggtgaaaaggaagaatccaaaaaggaggaaactccaggaactcctaaaaagaaggaaactaagaaaaaattcaaacttgagccacatgatgatcaggtttttctggatggaaatgaggtgtatgtatggatctatgacccagttcactttaaaacatttgtcatgggattaattcttgtgattgcagtaatagcggccaccctcttccccctttggccagcagaaatgagagtaggtgtttattacctcagtgtgggtgcaggctgttttgtagccagtattcttctccttgctgttgctcgatgcattctatttctcatcatttggctcataactggaggaaggcaccacttttggttcttgccaaatctgactgctgatgtgggcttcattgactccttcaggcctctgtacacacatgaatacaaaggaccaaaagcagacttaaagaaagatgagaagtctgaaaccaaaaagcaacagaagtccgacagtgaggaaaagtcagacagtgagaaaaaggaagatgaggaggggaaagtaggaccaggaaatcatggaacagaaggctcggggggagaacggcattcagacacggacagtgacaggagggaagatgatcgatcccagcacagtagtggaaatggaaatgattttgaaatgataacaaaagaggaactggaacagcaaacagatggggattgtgaagaggatgaggaagaggaaaatgatggagaaacacctaaatcttcacatgaaaaatcataatctgactaattttgggactgaatgaataagtacaagaggttggattttctatgttggctgattaccatattgaacacatggcatttgtagcattctttaaatctatctactgagatgtatttgacattcaagcagttatattcggtccttcattttatagaatattggcactattattggtacagtttaaagccattaatatgttttatccatttgataattttacagtaagtaggtctcattcattttgacagttatcaaagatgtactttccacagttaaatttacattaatggcaatttttgatagttttatggctttttactgttagactaatcaaaaataactttaaaaggaacaaagaaactccaacatttcacattatgcatagttatgtagccatttcacagtttctttaagatgtgtaaactcattgtccttgatagtttttatttttcattataaaattataccaggagatttcttttaagattctgagttagcagagttcaaaactattttgtggaaacaagccaactagtaacaatgcagcaacacttctggtttagctaaattatttttccaatgtaggaaatccacactgatttgtacgtctgactgagagaaagatggtcgtctccagcagagaaagtgaacagcatttgttggaaggtgatggctctccctcctccctccccatttcattggcgtaacgtaaagtgtattctgtacataatttacaaataaaacattttattttaattgttacttattatttagatatttctcaacacttaaattcataaaattaagaccatgtaagggtatgtttttagagaaatggaagtttgagtaacccacagaacatctgtgatctttctacagcagcttcagttttgtgccaacattccatgtattttgaatatgagcaaaaactgatcttaagagcagacttaaagtagctttgtacgccttaatgttcattttgatttattttaaatctttacattcagaaatgagatactgtattatcagaccaggaggcattgctgtgaaagataatttcctattctaaaatatcaaatttaaaataaagataatgaaagaaaacataagagaactattggactctaattgctttgaactagttttgcagtttgactttacgtcttatacatcttagttacaagtctttggaaactcttgtttacttatgagcataatcattccttggagttatactaactaataatgaatattaaatgatttttcttcagtc

SEQ ID NO: 365 - DNA, 5316 bp, Homo sapiens
cggacgcgtgggaacgaagccacccattacggtatgatgatgtcaaacgtgatgctgatgctacagttacagcccctgctggcgcagcctctctgattctctctccctctccgcgtccagtgctgggctttttcagacaagtgcatctcctaaccaggtcacatttcagccgcgacccactctccgccagtcaccggaggcagaccgcgggaggagagctgaggacagccgcgtgcgcttcgccagcagcggggtgggaggaaggacattaaaatactgcagaagtcaagaccccccaggtcgaacccagaccacgatgcgcgccccgggctgcgggcggctggtgctgccgctgctgctcctggccgcggcagccctggccgaaggcgacgccaaggggctcaaggagggcgagacccccggcaatttcatggaggacgagcaatggctgtcgtccatctcgcagtacagcggcaagatcaagcactggaaccgcttccgagacgaagtggaggatgactatatcaagagctgggaggacaatcagcaaggagatgaagccctggataccaccaaggacccctgccagaaggtgaagtgcagccgccacaaggtgtgcattgcccagggctaccagcgggccatgtgcatcagtcgcaagaagctggagcacaggatcaagcagccgaccgtgaaactccatggaaacaaagactccatctgcaagccctgccacatggcccagcttgcctctgtctgcggctcagatggccacacttacagctctgtgtgtaagctggagcaacaggcgtgcctgagcagcaagcagctggcggtgcgatgcgagggcccctgcccctgccccacggagcaggctgccacctccaccgccgatggcaaaccagagacttgcaccggtcaggacctggctgacctgggagatcggctgcgggactggttccagctccttcatgagaactccaagcagaatggctcagccagcagtgtagccggcccggccagcgggctggacaagagcctgggggccagctgcaaggactccattggctggatgttctccaagctggacaccagtgctgacctcttcctggaccagacggagctggccgccatcaacctggacaagtacgaggtctgcatccgtcccttcttcaactcctgtgacacctacaaggatggccgggtctctactgctgagtggtgcttctgcttctggagggagaagcccccctgcctggcagagctggagcgcatccagatccaggaggccgccaagaagaagccaggcatcttcatcccgagctgcgacgaggatggctactaccggaagatgcagtgtgaccagagcagcggtgactgctggtgtgtggaccagctgggcctggagctgactggcacgcgcacgcatgggagccccgactgcgatgacatcgtgggcttctcgggggactttggaagcggtgtcggctgggaggatgaggaggagaaggagacggaggaagcaggcgaggaggccgaggaggaggagggcgaggcaggcgaggctgacgacgggggctacatctggtagacgccctcagaagccggctgccgggggggactcaacagcagagctctgagcagcagcaggcaacttcgagaacggatccagaaatgcagtcagaaggaccctgctccacctggggggactgggagtgtgagtgtgcatggcatgtgtgtggcacagatggctgggacgggtgacagtgtgagtgcatgtgtgcatgcatgtgtgtatgtgtgtgtgtgtgtggcatgcgctgacaaatgtgtccttgatccacactgctcctggcagagtgagtaacccaaaggccccttcggcctccttgtagctgttttctttccttttgttgttggttttaaaatacattcacacacaaatacaaattgacaggtcaaaatccatgaaatgagatcccccagccgtgtcctccagcccagccctgaccccttggtttctaccctggctccccttggtttctaccctggctcaaccgacccctgtctgcccttctccctcctgcttctgaggtcaagctctggcctgcgagcctgtccccattgcaaaggggagggaggggcagggagctgtctaccagctgaggtcctcccaaaactgggccgatgtggtgtgacatccccaccagcctcagatgagacgggccaggacgcccagccacagcaagccctgtccctttgccggatccccaaacactagagaagctctcctaacccaaggcggagaatgaaggtggtggcggcagaggaggagggcagcagctgagaggccagggacagggtgcctcgccaagctgtctgaggtctgtcccaggtggcccaggtggtgcaggtagaacagggtgaggagagggggtcggctcaacaggaggaggctgtggctgcagagcctggaggagcttttaggtgttgagatggggcagctctgaatcctagaccctggaatagcctgtcccttttctctgggtctcgtggtggagccatgatctgggctgctctcttggggacactgggtggtggttacacagttgacctctgcctggctcccccttggtgcaactcctgcctccatcccccttgctggggtcccctcatccacttgagggcgcctgagggccaggagcagcaggcaaggagcctgggtctaggctaagggggtgtgtgcccacctcctccctgacccttaacactcctgtcctgcccagaccaacagagagagctgtccctgagaccccggagagaagcagctgccgaaagctgcagcctttccgcactctgagaccatgatcttcctcctgccaggggagagccacccacaggccatgtccagccccacttccctcagcccccagggcttccttctggcccctctgaggattccctagggctgccccgcagaggggcttccccaagctctgttttgaagcctgcaatgtggaaaagtgagaagtcagagggaacaggacaggtgcagccgggctctgaggccacacctcacacctcgctgttccccaacatcccctgagcagtgtgagctcatctcaccagatgagaagaggccctgtgcatttcttttgtttgtttgttgctgttttcccccacccatccagttctcctcagcaaagcaaattccttaacacctttggtggagaatttcttacccagacttggggctgtgatgcccttcagtgcgtggtgagtgcagcgtgtgtgcgtgtgcctgtgtgtgaacctgggggccatcctggtggcctgggagcgtgaggagaggccccctgtgtgctgggtgagtggtgggtgtggggtcaatgcagtgaggctctctgggtgaggctcccaacctggcagtccccagcctcccagcatctgtgagcgtctgttggactttacagaagagcctcatcccgtctgcccctcactctgccctggaatcaacatcttccgagtccttcttgggggaaatagcagagccccacttaactccataaactgcttcccattccgcagcccagttctgattgttgaggtgtcgcgtcgttccaggtcccccagtcccctctttctcctgtcctctctctgtccttcacctccccactccagccccggctcagttcagggaaatgctgttccatatcagccctctgctctctgaggcagccgcgcctctgactcggagctacttgaaacttctgctcttgctaggattggagtctacctatctcttccatttgtcccagctggagttctggaactttcctcctcggggtgggggtgggggttgttaaggatgctggggggcctggggaaggaaggagttcagaggaagggtgtcccctgtcctcttgatgtcaccctccgctcctgggacacgtgctctctctgtctctgggtcttctggctgtgcacgtttgtgtgtccttgtaaatatgttttaggaagaaagcaaaagggactgaactagcctctggtaggattgcaggggtccagccttgcctgtttccgaagcccccacactgcctttcgccccactgagactggtcccctcaaaaggtagacaaaacagcagctccctgtggagctgaagggcggcctcaaagtggctttttgttagacaaggttaaggtttcctcatgagcaaggttgcagatcggtccttcctcagctccttgatttgtgaccttgaccaaggggcctgccacccagcccctccagtgccctctcctcgatgcctcgctccttcctgcccccactcccctggcttaggcaggtaggggaattagggccatgctggaagaagcttaaccatgtgttcaaagaacggtttcttgcttgcttggtcctggaactccccttggctgccccaggcctccttggcccatgggtgctgggggaggtggatgtcagatctggtaggttgcagcagagaaaataaatgtgccttgagagaccactcagagagggtccaagggtgatggagaaggaagcatggcctgggagcttggaagggaggggtggtgggtggcggcatcttgactgccccctgttgtcccacacgtggggggtggtcaccccccttcactccagcccgcctgccttcagccttccatgagcttcacctgcttccaacttcactttggagggggtggggtccgttggcatcaacacggggaccctctgcttcaccaaagcccgagccctcagcccctggggagaacaaatggctgagctttgatacctggggtcgtcgagaggctgcgggctggcggcagtcccaggggagagacaccacagaaggagacccagacatcccgaggaagttcccagcagagcaaactgctttccagcctgaagcctgcttaaactgtgtgatgtgcaataactgagcttagagttaggaattgtgttcaagtgcttggatttccgtctgtagatttaactgctgaaattgtatctctcagtaattttagatgtcttttaaaaaattgaaaaacaaagtgttagactgtgtgcgtgtgcgttgatgggcactcaagagtcccgtgagtcatccagccctgcctttcccctgcgcccccatcctctcacgtcccgccctgcctccacttggggaccctgcctcgtgtcgtctttatctgcctattactcagcctaaggaaacaagtacactccacacatgcataaaggaaatcaaatgttatttttaagaaaatggaaaataaaaactttataaacacc

SEQ ID NO: 366 - DNA, 3890 bp, Homo sapiens
atgaaggtgataagcttattcattttggtgggatttataggagagttccaaagtttttcaagtgcctcctctccagtcaactgccagtgggacttctatgccccttggtcagaatgcaatggctgtaccaagactcagactcgcaggcggtcagttgctgtgtatgggcagtatggaggccagccttgtgttggaaatgcttttgaaacacagtcctgtgaacctacaagaggatgtccaacagaggagggatgtggagagcgtttcaggtgcttttcaggtcagtgcatcagcaaatcattggtttgcaatggggattctgactgtgatgaagacagtgctgatgaagacagatgtgaggactcagaaaggagaccttcctgtgatatcgataaacctcctcctaacatagaacttactggaaatggttacaatgaactcactggccagtttaggaacagagtcatcaataccaaaagttttggtggtcaatgtagaaaggtgtttagtggggatggaaaagatttctacaggctgagtggaaatgtcctgtcctatacattccaggtgaaaataaataatgattttaattatgaattttacaatagtacttggtcttatgtaaaacatacgtcgacagaacacacatcatctagtcggaagcgctccttttttagatcttcatcatcttcttcacgcagttatacttcacataccaatgaaatccataaaggaaagagttaccaactgctggttgttgagaacactgttgaagtggctcagttcattaataacaatccagaatttttacaacttgctgagccattctggaaggagctttcccacctcccctctctgtatgactacagtgcctaccgaagattaatcgaccagtacgggacacattatctgcaatctgggtcgttaggaggagaatacagagttctattttatgtggactcagaaaaattaaaacaaaatgattttaattcagtcgaagaaaagaaatgtaaatcctcaggttggcattttgtcgttaaattttcaagtcatggatgcaaggaactggaaaacgctttaaaagctgcttcaggaacccagaacaatgtattgcgaggagaaccgttcatcagagggggaggtgcaggcttcatatctggccttagttacctagagctggacaatcctgctggaaacaaaaggcgatattctgcctgggcagaatctgtgactaatcttcctcaagtcataaaacaaaagctgacacctttatatgagctggtaaaggaagtaccttgtgcctctgtgaaaaaactatacctgaaatgggctcttgaagagtatctggatgaatttgacccctgtcattgccggccttgtcaaaatggtggtttggctactgttgaggggacccattgtctgtgccattgcaaaccgtacacatttggtgcggcgtgtgagcaaggagtcctcgtagggaatcaagcaggaggggttgatggaggttggagttgctggtcctcttggagcccctgtgtccaagggaagaaaacaagaagccgtgaatgcaataacccacctcccagtgggggtgggagatcctgcgttggagaaacgacagaaagcacacaatgcgaagatgaggagctggagcacttgaggttgcttgaaccacattgctttcctttgtctttggttccaacagaattctgtccatcacctcctgccttgaaagatggatttgttcaagatgaaggtccaatgtttcctgtggggaaaaatgtagtgtacacttgcaatgaaggatactctcttattggaaacccagtggccagatgtggagaagatttacggtggcttgttggggaaatgcattgtcagaaaattgcctgtgttctacctgtactgatggatggcatacagagtcacccccaaaaacctttctacacagttggtgagaaggtgactgtttcctgttcaggtggcatgtccttagaaggtccttcagcatttctctgtggctccagccttaagtggagtcctgagatgaagaatgcccgctgtgtacaaaaagaaaatccgttaacacaggcagtgcctaaatgtcagcgctgggagaaactgcagaattcaagatgtgtttgtaaaatgccctacgaatgtggaccttccttggatgtatgtgctcaagatgagagaagcaaaaggatactgcctctgacagtttgcaagatgcatgttctccactgtcagggtagaaattacacccttactggtagggacagctgtactctgcctgcctcagctgagaaagcttgtggtgcctgcccactgtggggaaaatgtgatgctgagagcagcaaatgtgtctgccgagaagcatcggagtgcgaggaagaagggtttagcatttgtgtggaagtgaacggcaaggagcagacgatgtctgagtgtgaggcgggcgctctgagatgcagagggcagagcatctctgtcaccagcataaggccttgtgctgcggaaacccagtaggctcctggaggccatggtcagcttgcttggaatccagcaggcagctggggctgagtgaaaacatctgcacaactgggcactggacagcttttccttcttctccagtgtctaccttcctcctcaactcccagccatctgtataaacacaatcctttgttctcccaaatctgaatcgaattactcttttgcctcctttttaatgtcagtaaggatatgagcctttgcacaggctggctgcgtgttcttgaaataggtgttaccttctctgggccttggttttttaaaatctgtaaaattagaggattgcactagagaaacttgaatgctccattcaggcctatcattttattaagtatgattgacacagcccatgggccagaacacactctacaaaatgactaggataacagaaagaacgtgatctcctgattagagagggtggttttcctcaatggaaccaaatataaagaggacttgaacaaaaatgacagatacaaactatttctatcctgagtagtaatctcacacttcatcctatagagtcaaccaccacagataggaattccttattctttttttaatttttttaagacagagtctcactttgttgcccaggctggagcgcagtggggtgatctcatctccctgcaacctccgcctcctgggttgaagcgattcttgtgcctcagcttcccaagcagctgggattacaggtgcccgccaccacgcccagctaatttttgcatttttagtagagatgggtttcaccatgttggccatgctcgtctccaactcctgacctcaggtaatccgtctgccttggcctcccaaatgctgggattacagacatgaaccaccacgcctggctggaatacttactcttgtcgggagattgaaccactaaaatgttagagcagaattcattatgctgtggtcacaggggtgtcttgtctgagaacaaatacaattcagtcttctctttggggttttagtatgtgtcaaacataggactggaagtttgcccctgttcttttttcttttgaaagaacatcagttcatgcctgaggcatgagtgactgtgcatttgagatagttttccctattctgtggatacagtcccagagttttcagggagtacacaggtagattagtttgaagcattgaccttttatttattccttatttctctttcatcaaaacaaaacagcagctgtgggaggagaaatgagagggcttaaatgaaatttaaaataagctatattatacaaatactatctctgtattgttctgaccctggtaaatatatttcaaaacttcagatgacaaggattagaacactcattaagatgctattcttc

SEQ ID NO: 367 - DNA, 3112 bp, Homo sapiens
gtggaacctcgatattggtggtgtccatcgtgggcagcggactaataaaggccatggcgccagcagaaatcctgaacgggaaggagatctccgcgcaaataagggcgagactgaaaaatcaagtcactcagttgaaggagcaagtacctggtttcacaccacgcctggcaatattacaggttggcaacagagatgattccaatctttatataaatgtgaagctgaaggctgctgaagagattgggatcaaagccactcacattaagttaccaagaacaaccacagaatctgaggtgatgaagtacattacatctttgaatgaagactctactgtacatgggttcttagtgcagctacctttagattcagagaattccattaacactgaagaagtgatcaatgctattgcacccgagaaggatgtggatggattgactagcatcaatgctgggagacttgctagaggtgacctcaatgactgtttcattccttgtacgcctaagggatgcttggaactcatcaaagagacaggggtgccgattgccggaaggcatgctgtggtggttgggcgcagtaaaatagttggggccccgatgcatgacttgcttctgtggaacaatgccacagtgaccacctgccactccaagactgcccatctggatgaggaggtaaataaaggtgacatcctggtggttgcaactggtcagcctgaaatggttaaaggggagtggatcaaacctggggcaatagtcatcgactgtggaatcaattatgtcccagatgataaaaaaccaaatgggagaaaagttgtgggtgatgtggcatacgacgaggccaaagagagggcgagcttcatcactcctgttcctggcggcgtagggcccatgacagttgcaatgctcatgcagagcacagtagagagtgccaagcgtttcctggagaaatttaagccaggaaagtggatgattcagtataacaaccttaacctcaagacacctgttccaagtgacattgatatatcacgatcttgtaaaccgaagcccattggtaagctggctcgagaaattggtctgctgtctgaagaggtagaattatatggtgaaacaaaggccaaagttctgctgtcagcactagaacgcctgaagcaccggcctgatgggaaatacgtggtggtgactggaataactccaacacccctgggagaagggaaaagcacaactacaatcgggctagtgcaagcccttggtgcccatctctaccagaatgtctttgcgtgtgtgcgacagccttctcagggccccacctttggaataaaaggtggcgctgcaggaggcggctactcccaggtcattcctatggaagagtttaatctccacctcacaggtgacatccatgccatcactgcagctaataacctcgttgctgcggccattgatgctcggatatttcatgaactgacccagacagacaaggctctctttaatcgtttggtgccatcagtaaatggagtgagaaggttctctgacatccaaatccgaaggttaaagagactaggcattgaaaagactgaccctaccacactgacagatgaagagataaacagatttgcaagattggacattgatccagaaaccataacttggcaaagagtgttggataccaatgatagattcctgaggaagatcacgattggacaggctccaacggagaagggtcacacacggacggcccagtttgatatctctgtggccagtgaaattatggctgtcctggctctcaccacttctctagaagacatgagagagagactgggcaaaatggtggtggcatccagtaagaaaggagagcccgtcagtgccgaagatctgggggtgagtggtgcactgacagtgcttatgaaggacgcaatcaagcccaatctcatgcagacactggagggcactccagtgtttgtccatgctggcccgtttgccaacatcgcacatggcaattcctccatcattgcagaccggatcgcactcaagcttgttggcccagaagggtttgtagtgacggaagcaggatttggagcagacattggaatggaaaagttttttaacatcaaatgccggtattccggcctctgcccccacgtggtggtgcttgttgccactgtcagggctctcaagatgcacgggggcggccccacggtcactgctggactgcctcttcccaaggcttacatacaggagaacctggagctggttgaaaaaggcttcagtaacttgaagaaacaaattgaaaatgccagaatgtttggaattccagtagtagtggccgtgaatgcattcaagacggatacagagtctgagctggacctcatcagccgcctttccagagaacatggggcttttgatgccgtgaagtgcactcactgggcagaagggggcaagggtgccttagccctggctcaggccgtccagagagcagcacaagcacccagcagcttccagctcctttatgacctcaagctcccagttgaggataaaatcaggatcattgcacagaagatctatggagcagatgacattgaattacttcccgaagctcaacacaaagctgaagtctacacgaagcagggctttgggaatctccccatctgcatggctaaaacacacttgtctttgtctcacaacccagagcaaaaaggtgtccctacaggcttcattctgcccattcgcgacatccgcgccagcgttggggctggttttctgtaccccttagtaggaacgatgagcacaatgcctggactccccacccggccctgtttttatgatattgatttggaccctgaaacagaacaggtgaatggattattctaaacagatcaccatccatcttcaagaagctactttgaaagtctggccagtgtctattcaggcccactgggagttaggaagtataagtaagccaagagaagtcagcccctgcccagaagatctgaaactaatagtaggagtttccccagaagtcattttcagccttaattctcatcatgtataaattaacataaatcatgcatgtctgtttactttagtgacgttccacagaataaaaggaaacaagtttgcca

SEQ ID NO: 368 - DNA, 1855 bp, Homo sapiens
tgcattgcaccaggatgtctgtgaaatggacttcagtaattttgctaatacaactgagcttttgctttagctctgggaattgtggaaaggtgctggtgtgggcagcagaatacagccattggatgaatataaagacaatcctggatgagcttattcagagaggtcatgaggtgactgtactggcatcttcagcttccattctttttgatcccaacaactcatccgctcttaaaattgaaatttatcccacatctttaactaaaactgagttggagaatttcatcatgcaacagattaagagatggtcagaccttccaaaagatacattttggttatatttttcacaagtacaggaaatcatgtcaatatttggtgacataactagaaagttctgtaaagatgtagtttcaaataagaaatttatgaaaaaagtacaagagtcaagatttgacgtcatttttgcagatgctatttttccctgtagtgagctgctggctgagctatttaacataccctttgtgtacagtctcagcttctctcctggctacacttttgaaaagcatagtggaggatttattttccctccttcctacgtacctgttgttatgtcagaattaactgatcaaatgactttcatggagagggtaaaaaatatgatctatgtgctttactttgacttttggttcgaaatatttgacatgaagaagtgggatcagttttatagtgaagttctaggaagacccactacgttatctgagacaatggggaaagctgacgtatggcttattcgaaactcctggaattttcagtttcctcatccactcttaccaaatgttgattttgttggaggactccactgcaaacctgccaaacccctgcctaaggaaatggaagactttgtacagagctctggagaaaatggtgttgtggtgttttctctggggtcaatggtcagtaacatgacagaagaaagggccaacgtaattgcatcagccctggcccagatcccacaaaaggttctgtggagatttgatgggaataaaccagataccttaggtctcaatactcggctgtataagtggataccccagaatgaccttctaggtcatccaaagaccagagcttttataactcatggtggagccaatggcatctacgaggcaatctaccatgggatccctatggtggggattccattgtttgccgatcaacctgataacattgctcacatgaaggccaggggagcagctgttagagtggacttcaacacaatgtcgagtacagacttgctgaatgcattgaagagagtaattaatgatccttcatataaagagaatgttatgaaattatcaagaattcaacatgatcaaccagtgaagcccctggatcgagcagtcttctggattgaatttgtcatgcgccacaaaggagctaaacaccttcgggttgcagcccacgacctcacctggttccagtaccactctttggatgtgattgggttcctgctggtctgtgtggcaactgtgatatttatcgtcacaaaatgttgtctgttttgtttctggaagtttgctagaaaagcaaagaagggaaaaaatgattagttatatctgagatttgaagctggaaaacctgataggtgagactacttcagtttattccagcaagaaagattgtgatgcaagatttctttcttcctgagacaaaaaaaaaaaaaagaaaaaaaaatcttttcaaaatttactttgtcaaataaaaatttgtttttcagagatttaccacccagttcatggttagaaatattttgtggcaatgaagaaaacactacggaaaataaaaaataagataaagcctt

SEQ ID NO: 369 - DNA, 1238 bp, Homo sapiens; identical to SEQ ID NO: 114

SEQ ID NO: 370 - DNA, 2100 bp, Homo sapiens
ggcacgagctctctctctctctctctctctctctcgccgccatgacgctgcgcggcgccgtcttcgaccttgacggggtgctggcgctgccagcggtgttcggcgtcctcggccgcacggaggaggccctggcgctgcccagaggacttctgaatgatgctttccagaaagggggaccagagggtgccactacccggcttatgaaaggagagatcacactttcccagtggataccactcatggaagaaaactgcaggaagtgctccgagaccgctaaagtctgcctccccaagaatttctccataaaagaaatctttgacaaggcgatttcagccagaaagatcaaccgccccatgctccaggcagctctcatgctcaggaagaaaggattcactactgccatcctcaccaacacctggctggacgaccgtgctgagagagatggcctggcccagctgatgtgtgagctgaagatgcactttgacttcctgatagagtcgtgtcaggtgggaatggtcaaacctgaacctcagatctacaagtttctgctggacaccctgaaggccagccccagtgaggtcgtttttttggatgacatcggggctaatctgaagccagcccgtgacttgggaatggtcaccatcctggtccaggacactgacacggccctgaaagaactggagaaagtgaccggaatccagcttctcaataccccggcccctctgccgacctcttgcaatccaagtgacatgagccatgggtacgtgacagtaaagcccagggtccgtctgcattttgtggagctgggctggcctgctgtgtgcctctgccatggatttcccgagagttggtattcttggaggtaccagatccctgctctggcccaggcaggttaccgggtcctagctatggacatgaaaggctatggagagtcatctgctcctcccgaaatagaagaatattgcatggaagtgttatgtaaggagatggtaaccttcctggataaactgggcctctctcaagcagtgttcattggccatgactggggtggcatgctggtgtggtacatggctctcttctaccccgagagagtgagggcggtggccagtttgaatactcccttcataccagcaaatcccaacatgtcccctttggagagtatcaaagccaacccagtatttgattaccagctctacttccaagaaccaggagtggctgaggctgaactggaacagaacctgagtcggactttcaaaagcctcttcagagcaagcgatgagagtgttttatccatgcataaagtctgtgaagcgggaggactttttgtaaatagcccagaagagcccagcctcagcaggatggtcactgaggaggaaatccagttctatgtgcagcagttcaagaagtctggtttcagaggtcctctaaactggtaccgaaacatggaaaggaactggaagtgggcttgcaaaagcttgggacggaagatcctgattccggccctgatggtcacggcggagaaggacttcgtgctcgttcctcagatgtcccagcacatggaggactggattccccacctgaaaaggggacacattgaggactgtgggcactggacacagatggacaagccaaccgaggtgaatcagatcctcattaagtggctggattctgatgcccggaacccaccggtggtctcaaagatgtagaacgcagcgtagtgcccacgctcagcaggtgtgccatccttccacctgctggggcaccattcttagtatacagaggtggccttacacacatcttgcatggatggcagcattgttctgaaggggtttgcagaaaaaaaagattttctttacataaagtgaatcaaatttgacattattttagatcccagagaaatcaggtgtgattagttctccaggcatgaatgcatcgtccctttatctgtaagaacccttagtgtcctgtagggggacagaatggggtggccaggtggtgatttctctttgaccaatgcatagtttggcagaaaaatcagccgttcatttagaagaatcttagcagagattgggatgccttactcaataaagctaagatgac

SEQ ID NO: 371 - DNA, 3934 bp, Homo sapiens
tccagtaaggagtcggggtcttccccagttttctcagccaggcggcggcggcgactggcaatgtttggcctcaaaagaaacgcggtaatcggactcaacctctactgtgggggggccggcttgggggccggcagcggcggcgccacccgcccgggagggcgacttttggctacggagaaggaggcctcggcccggcgagagatagggggaggggaggccggcgcggtgattggcggaagcgccggcgcaagccccccgtccaccctcacgccagactcccggagggtcgcgcggccgccgcccattggcgccgaggtccccgacgtcaccgcgacccccgcgaggctgcttttcttcgcgcccacccgccgcgcggcgccgcttgaggagatggaagccccggccgctgacgccatcatgtcgcccgaagaggagctggacgggtacgagccggagcctctcgggaagcggccggctgtcctgccgctgctggagttggtcggggaatctggtaataacaccagtacggacgggtcactaccctcgacgccgccgccagcagaggaggaggaggacgagttgtaccggcagtcgctggagattatctctcggtaccttcgggagcaggccaccggcgccaaggacacaaagccaatgggcaggtctggggccaccagcaggaaggcgctggagaccttacgacgggttggggatggcgtgcagcgcaaccacgagacggtcttccaaggcatgcttcggaaactggacatcaaaaacgaagacgatgtgaaatcgttgtctcgagtgatgatccatgttttcagcgacggcgtaacaaactggggcaggattgtgactctcatttcttttggtgcctttgtggctaaacacttgaagaccataaaccaagaaagctgcatcgaaccattagcagaaagtatcacagacgttctcgtaaggacaaaacgggactggctagttaaacaaagaggctgggatgggtttgtggagttcttccatgtagaggacctagaaggtggcatcaggaatgtgctgctggcttttgcaggtgttgctggagtaggagctggtttggcatatctaataagatagccttactgtaagtgcaatagttgacttttaaccaaccaccaccaccaccaaaaccagtttatgcagttggactccaagctgtaacttcctagagttgcaccctagcaacctagccagaaaagcaagtggcaagaggattatggctaacaagaataaatacatgggaagagtgctccccattgattgaagagtcactgtctgaaagaagcaaagttcagtttcagcaacaaacaaactttgtttgggaagctatggaggaggacttttagatttagtgaagatggtagggtggaaagacttaatttccttgttgagaacaggaaagtggccagtagccaggcaagtcatagaattgattacccgccgaattcattaatttactgtagtagtgttaagagaagcactaagaatgccagtgacctgtgtaaaagttacaagtaatagaactatgactgtaagcctcagtactgtacaagggaagcttttcctctctctaattagctttcccagtatacttcttagaaagtccaagtgttcaggacttttatacctgttatactttggcttggttccatgattcttactttattagcctagtttatcaccaataatacttgacggaaggctcagtaattagttatgaatatggatatcctcaattcttaagacagcttgtaaatgtatttgtaaaaattgtatatatttttacagaaagtctatttccttgaaacgaaggaagtatcgaatttacattagtttttttcatacccttttgaactttgcaacttccgtaattaggaacctgtttcttacagcttttctatgctaaactttgttctgttcagttctagagtgtatacagaacgaattgatgtgtaactgtatgcagactggttgtagtggaacaaatctgataactatgcaggtttaaattttcttatctgattttggtaagtattccttagataggttttctttgaaaacctgggattgagaggttgatgaatggaaattctttcacttcattatatgcaagttttcaataattaggtctaagtggagttttaaggttactgatgacttacaaataatgggctctgattgggcaatactcatttgagttccttccatttgacctaatttaactggtgaaatttaaagtgaattcatgggctcatctttaaagcttttactaaaagattttcagctgaatggaactcattagctgtgtgcatataaaaagatcacatcaggtggatggagagacatttgatcccttgtttgcttaataaattataaaatgatggcttggaaaagcaggctagtctaaccatggtgctattattaggcttgcttgttacacacacaggtctaagcctagtatgtcaataaagcaaatacttactgttttgtttctattaatgattcccaaaccttgttgcaagtttttgcattggcatctttggatttcagtcttgatgtttgttctatcagacttaaccttttatttcctgtccttccttgaaattgctgattgttctgctccctctacagatatttatatcaattcctacagctttcccctgccatccctgaactctttctagcccttttagattttggcactgtgaaacccctgctggaaacctgagtgaccctccctccccaccaagagtccacagacctttcatctttcacgaacttgatcctgttagcaggtggtaataccatgggtgctgtgacactaacagtcattgagaggtgggaggaagtcccttttccttggactggtatcttttcaactattgttttatcctgtctttgggggcaatgtgtcaaaagtcccctcaggaattttcagaggaaagaacattttatgaggctttctctaaagtttcctttgtataggagtatgctcacttaaatttacagaaagaggtgagctgtgttaaacctcagagtttaaaagctactgataaactgaagaaagtgtctatattggaactagggtcatttgaaagcttcagtctcggaacatgacctttagtctgtggactccatttaaaaataggtatgaataagatgactaagaatgtaatggggaagaactgccctgcctgcccatctcagagccataaggtcatctttgctagagctatttttacctatgtatttatcgttcttgatcataagccgcttatttatatcatgtatctctaaggacctaaaagcactttatgtagtttttaattaatcttaagatctggttacggtaactaaaagcctgtctgccaaatccagtggaaacaagtgcatagatgtgaattggtttttaggggccccacttcccaattcattaggtatgactgtggaaatacagacaaggacttagttgatattttgggcttggggcagtgagggcttaggacaccccaagtggtttgggaaaggaggagggagtggtgggtttataggggaggaggaggcaggtggtctaagtgctgactggctacgtagttcgggcaaatcctccaaaagggaaagggaggatttgcttagaaggatggggctcccagtgactactttttgacttctgtttgtcttacgcttctctcagggaaaaacatgcagtcctctagtgtttcatgtacattctgtggggggtgaacaccttggttctggttaaacagctgtacttttgatagctgtgccaggaagggttaggaccaactacaaattaatgttggttgtcaaatgtagtgtgtttccctaactttctgtttttcctgagaaaaaaaaataaatcttttattcaaataaa

SEQ ID NO: 372 - DNA, 855 bp, Homo sapiens
gcatacgcagatatatgattgaaaatcactttgtgacatctcatttgctgataatgaaatgccaatgactgttaccttgtataaaaaaccaaatatgcgtgttagaagtgctgtcattttactcaaaatacacagatttgaaagtttgtcactgtttctgttctcaattgtcctttctccacatctagctcaagactgcagtgcagatgacgacaacttccttgtgcccattgcggtgggagctgccttggcaggagtacttattctagtgttgctggcttattttattggtctcaagcaccatcatgctggatatgagcaattttagaatctgcaacctgattgattatataaaaatacatgcaaataacaagattttcttacctctcagttgttgaaacactttgcttcttaaaattgatatgttgaaactttaattcttttatcaatcccagcattttgagatcagtctttattaataaaacctgttctctttaatcagcttaaaatccaaagtgtcatatttactggtcctggagacaaacttgttcaaaagaacatcaacgtgcaatgttttaagggtctatcttaaccaagccctggccaaattttgacctaacttgaagtatccttgaacttattaacatggccattataagaataaaatatgtagttgtgtcttaatggaattaataaatgtcatttcactactggtgttctgtttcaatctataaggactatagtgatttaaactcatcaatgtgcctttgcataaagttcattaaataaatattgatgtggtataaatgcccatcagatatgcttaaacttggttttcagttgaatgaagtagag

SEQ ID NO: 373 - DNA, 1792 bp, Homo sapiens
gaattccatatcatggcctgccgccgccgccgccgccgccggagctctgtagtatggcatcgaggagaatggagaccaaacctgtgataacctgtctcaaaaccctcctcatcatctactccttcgtcttctggatcactggggtgatcctgctggctgttggagtctggggcaaacttactctgggcacctatatctcccttattgccgagaactccacaaatgctccctatgtgctcatcggaactggcaccactattgttgtctttggcctgtttggatgctttgctacatgtcgtggtagcccatggatgctgaaactgtatgccatgtttctgtccctggtgttcctggctgagctcgtagctggcatttcagggtttgtgtttcgtcatgagatcaaggacaccttcctgaggacttacacggacgctatgcagacttacaatggcaatgatgagaggagccgggcagtggaccatgtgcagcgcagcctgagctgctgtggtgtgcagaactacaccaactggagcaccagcccctacttcctggagcatggcatcccccccagctgctgcatgaacgaaactgattgtaatccccaggatctacacaatctgactgtggccgccaccaaagttaaccagaagggttgttatgatctggtaactagtttcatggagactaacatgggaatcatcgctggagtggcgtttggaatcgcattctcccagttaattggcatgctgctggcctgctgtctgtcccggttcatcacggccaatcagtatgagatggtgtaaggagaagtctttcaagaatgacggaataagagacctgttttaaaaaggaactgcagcaatctttgaaagacttccaaagaatgttagagcacagtacataatacacttgccctgctccctctaccccttaccccacaacgtgcaactgacactcccacccagtctctgctccacctttcagcccacgtcacgtgtagtgtccattttgtgaagccctgttgtgccacagagtgtagccaggtccccctgcagctagtcctagtgaacctcaccccgaggccctgcatgggccagcccctccatctgtacttggtccaactgcaactcatcatcggtgactggttatcacaccatcgctggcccctttgggccctgcatgtagtgtgggaggctcctgttagctcctcactgtggtaaatgccacacacctttaagtagataagcagacgatagttatctgttcttttgacttaatctcatttggtttgattttccctctactaaggctttcctaccttcttcaggctgcctaagacatgtaacgaaacacttcaataattgtccatgaggagaaaaaaagcatgtgtcatgcatgaaggaaactgaacttgaggtggcctccttgcttgttacatacctgggtatgtgtaggcagtttagtgcatctttgcctctcagttgaaacctgtataaccctgttacaaagctgtgttgttgcttcttgtgaaggccatgatattttgtttttccccaattaattgctattgtgttattttactacttctctctgtattttttcttgcattgacattatagacattgaggacctcatccaaacaatttaaaaatgagtgtgaagggggaacaagtcaaaatatttttaaaagatcttcaaaaataatgcctctgtctagcatgccaacaagaatgcattgatattgtgaacatttgtgatatatgtattaataaatagagcaattacggaattc

SEQ ID NO: 374 - DNA, 4957 bp, Homo sapiens
gaccgaacacgttctttaggctccagcaaagcgccccactcggcgggtcggtgccgccgggtcccaggtgcccgctacttcccagaactcgcctcccgctccgggccctcgaaccagcgcggacaccacaatggaccgggcgtccgagctgctcttctacgtgaacggccgcaaggtgatagaaaaaaatgtcgatcctgaaacaatgctgttgccttatttgaggaagaagcttcgactcacaggaactccgtatggctgtggaggaggaggctgtggtgcttgtacagtgatgatatcacgatacaaccccatcaccaagaggataaggcatcacccagccaatgcctgtctgattcccatctgttctctgtatggtgctgccgtcaccacagtagaaggcataggaagcacccacaccagaattcatcctgttcaggagaggattgccaagtgtcatggcacccagtgtggcttctgcacacctgggatggtgatgtccatctaccccctgctcaggaaccacccagagcccactctggatcagttaactgatgcccttggtggtaacctgtgccgttgccatggatacaggcccataattgatgcatgcaagactttctgtaaaacttcgggctgctgtcaaagtaaagaaaatggggtttgctgtttggatcaaggaatcaatggattgccagaatttgaggaaggaagtaagacaagtccaaaactcttcgcagaagaggagtttctgccattggatccaacccaggaactgatatttcctcctgagctaatgataatggctgataaacagtcgcaaaggaccagggtgtttggcagtgagagaatgatgtggttttcccccgtgaccctgaaggacctgctggaatttaaattcaagtatccccaggctcctgttatcatgggaaacacctctgtggggcctgaagtgaaatttaaaggcgtctttcacccaggttataattctcctgatagaattgaagaacctgagtgttgtaaaccatgcatatatggactcacccttggtgctggtctcagcctagcccaggtgaaggacattttggctgatgtagtccagaagcttccagaggagaagacacagatgtaccatgctctcctgaagcatttgggaactctggctgggtcccagatcaggaacatggcttctttagggggacacatcattagcaggcatccagattcagatctgaatcccatcctggctgtgggtaactgtaccctcaacttgctatcaaaagaaggaaaacgacagattcctttaaatgagcaattcctcagcaagtgccctaatgcagatcttaagcctcaagaaatcttggtctcagtgaacatccccatctcaaggaagtgggaatttgtgtcagccttccgacaagcccagcgacaggagaatgcgctagcgatagtcaattcaggaatgagagtcttttttggagaaggggatggcattattagagagttatgcatctcatatggaggcgttggtccagccaccatctgtgccaagaattcctgccagaaactcattggaaggcactggaacgaacagatgctggatatagcctgcaggcttattctgaatgaagtctcccttttgggctcggcgccaggtgggaaagtggagttcaagaggactctcatcatcagcttcctcttcaagttctacctggaagtgtcacagattttgaaaaagatggatccagttcactatcctagccttgcagacaagtatgaaagtgctttagaagatcttcattccaaacatcactgcagtacattaaagtaccagaatataggcccaaagcagcatcctgaagacccaattggccaccccatcatgcatctgtctggtgtgaagcatgccacgggggaggccatctactgtgatgacatgcctctggtggaccaggaacttttcttgacttttgtgactagttcaagagctcatgctaagattgtgtctattgatctgtcagaagctctcagcatgcccggtgtggtggacatcatgacagcagaacatcttagtgacgtcaactccttctgcttttttactgaagctgagaaatttctggcgacagataaggtgttctgtgtgggtcagcttgtctgtgctgtgcttgccgattctgaggttcaggcaaagcgagctgctaagcgagtgaagattgtctatcaagacttggagccgctgatactaacaattgaggaaagtatacaacacaactcctccttcaagccagaaaggaaactggaatatggaaatgttgacgaagcatttaaagtggttgatcaaattcttgaaggtgaaatacatatgggaggtcaagaacatttttatatggaaacccaaagcatgcttgtcgttcccaagggagaggatcaagaaatggatgtctacgtgtccacacagtttcccaaatatatacaggacattgttgcctcaaccttgaagctcccagctaacaaggtcatgtgccatgtaaggcgtgttggtggagcgtttggagggaaggtgttaaaaaccggaatcattgcagccgtcactgcatttgccgcaaacaaacatggccgtgcagttcgctgtgttctggaacgaggagaagacatgttaataactggaggccgccatccttaccttggaaagtacaaagctggattcatgaacgatggcagaatcttggccctggacatggagcattacagcaatgcaggcgcctccttggatgaatcattattcgtgatagaaatgggacttctgaaaatggacaatgcttacaagtttcccaatctccgctgccggggttgggcatgcagaaccaaccttccatccaacacagcttttcgtgggtttggctttcctcaggcagtgctgatcaccgaatcttgtatcacggaagttgcagccaaatgtggactatcccctgagaaggtgcgaatcataaacatgtacaaggaaattgatcaaacaccctacaaacaagagatcaatgccaagaacctaatccagtgttggagagaatgtatggccatgtcttcctactccttgaggaaagttgctgtggaaaagttcaatgcagagaattattggaagaagaaaggactggccatggtccccctgaagtttcctgttggccttgcgtcacgtgctgctggtcaggctgctgccttggttcacatttatcttgatggctctgtgctggtcactcacggtggaattgaaatggggcagggggtccacactaaaatgattcaggtggtcagccgtgaattaagaatgccaatgtcgaatgtccacctgcgtggaacaagcacagaaactgtccctaatgcaaatatctctggaggttctgtggtggcagatctcaacggtttggcagtaaaggatgcctgtcaaactcttctaaaacgcctcgaacccatcatcagcaagaatcctaaaggaacttggaaagactgggcacagactgcttttgatgaaagcattaacctttcagctgttggatacttcagaggttatgagtcagacatgaactgggagaaaggcgaaggccagcccttcgaatactttgtttatggagctgcctgttccgaggttgaaatagactgcctgacgggggatcataagaacatcagaacagacattgtcatggatgttggctgcagtataaatccagccattgacataggccagattgaaggtgcatttattcaaggcatgggactttatacaatagaggaactgaattattctccccagggcattctgcacactcgtggtccagaccaatataaaatccctgccatctgtgacatgcccacggagttgcacattgctttgttgcctccttctcaaaactcaaatactctttattcatctaagggtctgggagagtcgggggtgttcctggggtgttccgtgtttttcgctatccatgacgcagtgagtgcagcacgacaggagagaggcctgcatggacccttgacccttaatagtccactgaccccggagaagattaggatggcctgtgaagacaagttcacaaaaatgattccgagagatgaacctggatcctacgttccttggaatgtacccatctgaatcaaatgcaaacttctggagaaaacagagtgcctcttcccagatggcaatctgtcctatctctgtgctggaagatgctagatctgaaagacagagtttccacagttcagaaatcatcccacagtgttgcttttctctggagctgatttaaagtattccatttagatttgatagatatgcttaagcaatctataaatcattttcaatgttataaacactaattggtttcctctagggtgatattcgtcattactctgtctcttcaatccatccagctaaatggaataggtgatgacttggatgtgactcctacttggcttctatcaccaacagaaattataccatatagtgaaaggcaattttctaaataatttcattactaatatgaactgtgaagttgtcattttttcatttgtccttttctgctatcaccttcctcttgtcagaatgaatatagacacatgtatctaagtgggaccaaagaaaaaatagcgaactttcaccaaagttttcatgaaaacccaaaagctttaaaagttactatcaagaaattgaaaggaaacccacagaataggataaaatatttgtaaatcatatttgataaaagtcttgtaaccagatacataaagagctcttacaactcaataaaaggcaagtaatttaaaaataggcaaaagaattgctggatggtatggtagttctatttttagtttttaccctaactactctgacttgatcatttaacattctgtgtatgtaacaaaatatcacatgcataaatattatgtgtcaataaaattttttaatggg

SEQ ID NO: 375 - DNA, 3829 bp, Homo sapiens
tcccactcggctcctcttacggagtcctcattccaccccccttgtttccgcattcatcctgagtggctggtgggaacgtgaaaagggagaggaaaaggcgcaagaagccagagagaggggtgtgggaaaagcgaaaacaggctgccaaatcaggggattccttccaatttaaaaaggaagtctgctgacgttagttagttaaatttaacatctttttatgtgtaacacttgactttggaagcaaaaatgaactttgcggagagagagggctctaagagatactgcattcaaacgaaacatgtggccattctctgtgcggtggtggtgggtgtaggattaatagtgggacttgccgtgggcttgaccagatcgtgtgactccagcggggacggcgggccgggcactgcgccagctccttcccacctgccttcttccacggccagcccctcaggtcctcctgcccaggaccaggacatctgcccggccagtgaggatgagagcggacagtggaaaaactttcgactgccggacttcgtcaacccagtccactacgacctgcacgtgaagcccctgttggaggaggacacctacacgggcaccgtgagcatctccatcaacctgagcgctcccacccggtacctgtggctgcacctccgggagaccaggatcacccggctcccggagctgaagaggccctctggggaccaggtgcaagtccggaggtgtttcgagtacaaaaagcaggagtacgtggtggtcgaggcggaggaagagcttacccccagcagtggagatggcctgtatctcctgaccatggagttcgccggctggctgaacggctccctcgtgggattttatagaaccacctacacggagaacggacgagtcaagagcatagtggccaccgatcatgaaccaacagatgccaggaaatcttttccttgttttgatgagcccaacaaaaaggcaacttatacaatatctatcacccatcccaaagaatacggagcactttcaaatatgccagtggcgaaagaagagtcagtggatgataaatggactcgaacaacttttgagaagtctgtccccatgagcacgtacctggtgtgctttgctgtacatcaatttgactctgtaaagagaatatcaaatagtggaaaacctcttacaatttatgtccagccagagcaaaagcacacagccgaatatgctgcaaacataactaaaagtgtgtttgattattttgaagaatactttgctatgaattattctcttcctaaattagataaaatcgctattccagattttggcactggtgccatggagaactggggactcatcacgtacagagaaacgaacctgctttatgaccctaaggaatcagcctcatcaaaccaacagagggtggccactgtggttgcccatgaacttgtgcatcagtggtttggaaatattgtgaccatggactggtgggaagacttgtggctaaatgaaggatttgcttctttctttgagtttctgggagtaaaccatgcagaaacagactggcaaatgcgtgaccaaatgttacttgaagatgtattacctgttcaagaggatgattctttgatgtcttcgcatccaattattgtgactgtgacaacccctgatgaaataacatctgtttttgatggaatatcctatagcaagggatcttctattttgagaatgcttgaagactggataaaaccagagaattttcaaaaaggatgtcagatgtacttggaaaaataccaattcaagaatgcaaaaacttctgatttttgggcagcactggaagaggcaagtaggctaccagtgaaagaagtaatggacacctggaccagacagatgggttatcctgtgcttaacgtgaacggtgtcaagaacatcacacagaaacgctttttgttggacccaagagctaacccttctcagcccccttcagatcttggttatacatggaatatcccagttaaatggactgaagataatataacaagcagtgtgttatttaataggtcagaaaaagaaggaatcactttgaactcctctaatcctagtggaaatgcttttctcaaaataaacccagatcatattgggttttatcgtgtaaattatgaagtagcaacttgggactcgatagctacagcgctctccttgaaccacaagacattttcttcagcagatcgtgcaagtcttattgatgatgcttttgccttggcaagagctcaacttctagattataaggtggctttgaacttgaccaagtatctcaaaagggaagagaattttttaccatggcagagagtaatttcagctgtaacctacatcattagcatgtttgaagatgataaagagctatatcctatgattgaggaatacttccaaggtcaagtgaagcctattgcagattctctgggatggaatgatgctggagaccatgtcacaaagttactccgttcctccgtgttagggtttgcgtgcaagatgggagacagagaagccttgaacaatgcttcctcgttatttgagcagtggctaaatgggactgtaagccttcccgtaaatctcaggcttctggtgtatcggtatgggatgcagaactctggcaatgagatttcatggaactacactcttgagcaataccagaaaacttcattagctcaagaaaaagaaaaactgctgtatggattagcatcagtgaagaacgttactcttttgtcaaggtatttggatttgctcaaggacacgaaccttattaaaactcaggatgtgtttacagtcattcgatatatctcatataacagctatgggaagaacatggcctggaattggatacaactcaactgggactatctagtcaacagatatacactcaataacagaaaccttggccgaattgtcacaatagcagagccattcaacactgaactgcaactgtggcagatggagagcttttttgcaaaatatccacaagctggagcaggagaaaaacctagggaacaagtgctggaaacagtgaaaaacaatatagagtggctaaaacaacatagaaacaccatcagagaatggttttttaatttacttgagagtggttaatgtattcaaatgttagagtttaattttgtgaatctattgtttctcctctgaagcatttggtggcctaatttacaagcacgatggagagagccttataaacagataatgcttttactaagcactgtgtttatatgtcttgcaaagcctttaaattgttcctctttgtttatgaagaaagatactaatagagtacttaatatactcagggattccttctaagtgtacttcataagatattctttacaaactgaagataatgaaatagttattttaatacctttaaatatcattctttgtatcttaaatctgtgaagtagaacaatttggtcttagctttacattttcagtaccaaagaaacaccacttaatcttctctcttgattgatttttaaagtttaaataccagtacttgagggaccaatattaccatcttaatctttattttattattcagaattatacagacctaatatcattttattcacatatgtcttactactttaaatcctaccaaagtaacctgggcttaagttttacttgaggatcatatgaattagccaaaagaatggctgactgttgcctttactcttataaaatcaataagagaactctcctctttttttaaaaataaatctaaatgattatcttgaaaaagtattgttttccagtgtcacttgactcttgaataaaaataactgcagtgttcccc

SEQ ID NO: 376 - DNA, 1381 bp, Homo sapiens
tgggtgttggaggctttaaggtagctttaaattcgtgttgtcctgggagctcgcccttttcggctggagtcgggctttacggcgccggatggctctggacgtgaagtctcgggcaaagcgttatgagaagctggacttccttggggagggacagtttgccaccgtttacaaggccagagataagaataccaaccaaattgtcgccattaagaaagagtctctgctggtagccactacagctgtgaatgtgctgtgtcatacctgaagccaatatgtctcggagtttcacctgaggcccatgatcaaacttggacatagatcagaagctaaagatggtataaatagaaccgccttaagagagataaaattattacaggagctaagtcatccaaatataattggtctccttgatgcttttggacataaatctaatattagccttgtctttgattttatggaaactgatctagaggttataataaaggataatagtcttgtgctgacaccatcacacatcaaagcctacatgttgatgactcttcaaggattagaatatttacatcaacattggatcctacatagggatctgaaaccaaacaacttgttgctagatgaaaatggagttctaaaactggcagattttggcctggccaaatcttttgggagccccaatagagcttatacacatcaggttgtaaccaggtggtatcgggcccccgagttactatttggagctaggatgtatggtgtaggtgtggacatgtgggctgttggctgtatattagcagagttacttctaagggttccttttttgccaggagattcagaccttgatcagctaacaagaatatttgaaactttgggcacaccaactgaggaacagtggccggacatgtgtagtcttccagattatgtgacatttaagagtttccctggaatacctttgcatcacatcttcagtgcagcaggagacgacttactagatctcatacaaggcttattcttatttaatccatgtgctcgaattacggccacacaggcactgaaaatgaagtatttcagtaatcggccagggccaacacctggatgtcagctgccaagaccaaactgtccagtggaaaccttaaaggagcaatcaaatccagctttggcaataaaaaggaaaagaacagaggccttagaacaaggaggattgcccaagaaactaattttttaaagagaacactggacaacattttactactgagggaaatagccaaaaaggcaaataatggaaaaatagtaaacattaagtaaatgctgtagaagtgagtttgtaaatattctacacatgtaaaatatgtaaaactatgggttatttttattaaatgtattttaaaaa

SEQ ID NO: 377 - DNA, 4484 bp, Homo sapiens
tgcccaggaggagtaggagcaggagcagaagcagaagcggggtccggagctgcgcgcctacgcgggacctgtgtccgaaatgccggtgcgaggagaccgcgggtttccaccccggcgggagctgtcaggttggctccgcgccccaggcatggaagagctgatatgggaacagtacactgtgaccctacaaaaggattccaaaagaggatttggaattgcagtgtccggaggcagagacaacccccactttgaaaatggagaaacgtcaattgtcatttctgatgtgctcccgggtgggcctgctgatgggctgctccaagaaaatgacagagtggtcatggtcaatggcacccccatggaggatgtgcttcattcgtttgcagttcagcagctcagaaaaagtgggaaggtcgctgctattgtggtcaagaggccccggaaggtccaggtggccgcacttcaggccagccctcccctggatcaggatgaccgggcttttgaggtgatggacgagtttgatggcagaagtttccggagtggctacagcgagaggagccggctgaacagccatggggggcgcagccgcagctgggaggacagcccggaaagggggcgtccccatgagcgggcccggagccgggagcgggacctcagccgggaccggagccgtggccggagcctggagcggggcctggaccaagaccatgcgcgcacccgagaccgcagccgtggccggagcctggagcggggcctggaccacgactttgggccatcccgggaccgggaccgtgaccgcagccgcggccggagcattgaccaggactacgagcgagcctatcaccgggcctacgacccagactacgagcgggcctacagcccggagtacaggcgcggggcccgccacgatgcccgctctcggggaccccgaagccgcagccgcgagcacccgcactcacggagccccagccccgagcctagggggcggccggggcccatcggggtcctcctgatgaaaagcagagcgaacgaagagtatggtctccggcttgggagtcagatcttcgtaaaggaaatgacccgaacgggtctggcaactaaagatggcaaccttcacgaaggagacataattctcaagatcaatgggactgtaactgagaacatgtctttaacggatgctcgaaaattgatagaaaagtcaagaggaaaactacagctagtggtgttgagagacagccagcagaccctcatcaacatcccgtcattaaatgacagtgactcagaaatagaagatatttcagaaatagagtcaacccgatcattttctccagaggagagacgtcatcagtattctgattatgattatcattcctcaagtgagaagctgaaggaaaggccaagttccagagaggacacgccgagcagattgtccaggatgggtgcgacacccactccctttaagtccacaggggatattgcaggcacagttgtcccagagaccaacaaggaacccagataccaagaggaacccccagctcctcaaccaaaagcagccccgagaacttttcttcgtcctagtcctgaagatgaagcaatatatggccctaataccaaaatggtaaggttcaagaagggagacagcgtgggcctccggttggctggtggcaatgatgtcgggatatttgttgctggcattcaagaagggacctcggcggagcaggagggccttcaagaaggagaccagattctgaaggtgaacacacaggatttcagaggattagtgcgggaggatgccgttctctacctgttagaaatccctaaaggtgaaatggtgaccattttagctcagagccgagccgatgtgtatagagacatcctggcttgtggcagaggggattcgttttttataagaagccactttgaatgtgagaaggaaactccacagagcctggccttcaccagaggggaggtcttccgagtggtagacacactgtatgacggcaagctgggcaactggctggctgtgaggattgggaacgagttggagaaaggcttaatccccaacaagagcagagctgaacaaatggccagtgttcaaaatgcccagagagacaacgctggggaccgggcagatttctggagaatgcgtggccagaggtctggggtgaagaagaacctgaggaaaagtcgggaagacctcacagctgttgtgtctgtcagcaccaagttcccagcttatgagagggttttgctgcgagaagctggtttcaagagacctgtggtcttattcggccccatagctgatatagcaatggaaaaattggctaatgagttacctgactggtttcaaactgctaaaacggaaccaaaagatgcaggatctgagaaatccactggagtggtccggttaaataccgtgaggcaagttattgaacaggataagcatgcactactggatgtgactccgaaagctgtggacctgttgaattacacccagtggttctcaattgtgatttctttcacgccagactccagacaaggtgtcaacaccatgagacaaaggttagacccaacgtccaacaatagttctcgaaagttatttgatcacgccaacaagcttaaaaaaacgtgtgcacacctttttacagctacaatcaacctaaattcagccaatgatagctggtttggcagcttaaaggacactattcagcatcagcaaggagaagcggtttgggtctctgaaggaaagatggaagggatggatgatgaccccgaagaccgcatgtcctacttaactgccatgggcgcagactatctgagttgcgacagccgcctcatcagtgactttgaagacacggacggtgaaggaggcgcctacactgacaatgagctggatgagccagccgaggagccgctggtgtcgtccatcacccgctcctcggagccggtgcagcacgaggagagcataaggaaacccagcccagagccacgagctcagatgaggagggctgctagcagcgatcaacttagggacaatagcccgcccccagcattcaagccagagccgtccaaggccaaaacccagaacaaagaagaatcctatgacttctccaaatcctatgaatataagtcaaacccctctgccgttgctggtaatgaaactcctggggcatctaccaaaggttatcctcctcctgttgcagcaaaacctacctttgggcggtctatactgaagccctccactcccatccctcctcaagagggtgaggaggtgggagagagcagtgaggagcaagataatgctcccaaatcagtcctgggcaaagtcaaaatatttggagaagatggatcacaagggccagggttacaagagaatgcaggagctccaggaagcacagaatgcaaggatcgaaattgcccagaagcatcctgatatctatgcagttccaatcaaaacgcacaagccagaccctggcacgccccagcacacgagttccagaccccctgagccacagaaagctccttccagaccttatcaggataccagaggaagttatggcagtgatgccgaggaggaggagtaccgccagcagctgtcagaacactccaagcgcggttactatggccagtctgcccgataccgggacacagaattatagatgtctgagcacggactctcccaggcctgcctgcatggcatcagactagccactcctgccaggccgccgggatggttcttctccagttagaatgcaccatggagacgtggtgggactccagctcgtgtgtcctcatggagaacccaggggacagctggtgcaaattcagaactgagggctctgtttgtgggactgggttagaggagtctgtggctttttgttcagaattaagcagaacactgcagtcagatcctgttacttgcttcagtggaccgaaatctgtattctgtttgcgtacttgtaatatgtatattaagaagcaataactatttttcctcattaatagctgccttcaaggactgtttcagtgtgagtcagaatgtgaaaaaggaataaaaaatactgttgggctcaaactaaattcaaagaagtactttattgcaactcttttaagtgccttggatgagaagtgtcttaaattttcttcctttgaagctttaggcagagccataatggactaaaacattttgactaagtttttataccagcttaatagctgtagttttccctgcactgtgtcatcttttcaaggcatttgtctttgtaatattttccataaatttggactgtctatatcataactatacttgatagtttggctataagtgctcaatagcttgaagcccaagaagttggtatcgaaatttgttgtttgtttaaacccaagtgctgcacaaaagcagatacttgaggaaaacactatttccaaaagcacatgtattgacaacagttttataatttaataaaaaggaatacattgcaatccgt

SEQ ID NO: 378 - DNA, 1008 bp, Homo sapiens
aattcggtaccccgtagcgaccggcgctcagctggaattcgggggaagttgctggctgactgggcttgcgaggaaaccgcctcggagctgcagcgaaggccaaggaatcactgaagatcggcgagggaggacagggggttcatcatgggtggctttttctcaagtatattttccagtctgtttggaactcgggaaatgagaattttaattttgggattagatggagcaggaaaaaccacaattttgtacagattacaagtgggagaagttgttactactatacctaccattggatttaatgtagagacggtgacgtacaaaaaccttaaattccaagtctgggatttaggaggacagacaagtatcaggccatactggagatgttactattcaaacacagatgcagtcatttatgtagtagacagttgtgaccgagaccgaattggcatttccaaatcagagttagttgccatgttggaggaagaagagctgagaaaagccattttagtggtgtttgcaaataaacaggacatggaacaggccatgacttcctcagagatggcaaattcacttgggttacctgccttgaaggaccgaaaatggcagatattcaaaacgtcagcaaccaaaggcaccggccttgatgaggcaatggaatggttagttgaaacattaaaaagcagacagtaattcagtccattcttctcccctgaaatgaagactacatcacctctctccctttggaaacagtcaagtgtacttcacactactagatgttaaaactatatgattattggcatatactgactgactgcaatatttgtagtaaatagggaaaataagtatttagttggagggataatttgatcgaatcacctgaatgttctatgtaatgtaaaatattcttttcttgctttcttgtgttaaggtatatattctatttgtatggaattcttattcaaatacagttgtattaaagagtatactcctattggatgaaaaaaacct

SEQ ID NO: 379 - DNA, 1834 bp, Homo sapiens; identical to SEQ ID NO: 115

SEQ ID NO: 380 - DNA, 2518 bp, Homo sapiens; identical to SEQ ID NO: 116

SEQ ID NO: 381 - DNA, 2482 bp, Homo sapiens; identical to SEQ ID NO: 117

SEQ ID NO: 382 - DNA, 2806 bp, Homo sapiens
ggatccaggactgagatcccagaaccatgaacctggccatcagcatcgctctcctgctaacaggtacccggcatggggcaggactggggctccaggcgccctggcttccttccctccagagaagcagcttctccctcacagtctcagaaaagcgcaggtgacaaagagagggctctttttcatcctgaagtcagccgatccaccgcgctgatattctgacggcctgaggtggtttttggaaacacagtttgctgagccctccttcacactattgaactagaatccccaactgagaacccaggaaccagcatcaactccctaagatctcctgtccttgaaacacattgataggatccaaggctcaagcagagtggggagggaggctggggtctgcaaaggagaagtgggatccctggggtggggaaaggcactcagagagcagaccccggtcccctccctagccaggcccatctctccacttcaggtgggtgggaggcccctgtgccgcaggcccctccagtttgaaggaggcactgctggtgccagtcttgcaggtctcccgagggcagaaggtgaccagcctaacggcctgcctagtggaccagagccttcgtctggactgccgccatgagaataccagcagttcacccatccagtacgagttcagcctgacccgtgagacaaagaagcacgtgctctttggcactgtgggggtgcctgagcacacataccgctcccgaaccaacttcaccagcaaataccacatgaaggtcctctacttatccgccttcactagcaaggacgagggcacctacacgtgtgcactccaccactctggccattccccacccatctcctcccagaacgtcacagtgctcagaggtgagacaagcccctaacaaggtcaagtgagctgggagagccaggctcggggacagcaggcagttcccttggctggactagagaggagaatagccccataacgctctcaccctctcccaactgctgcctggtcaactggggaaccattgccttcggtgtgaatggggtgaagagctcagggccagacaggcagagcagtgtggttccaccagaactgtgggcaaggcctttggcccctaatcttccttctcccagcgggaaacagggatgacaccacctccctcagccagttttcttgtcatgatgtttagtaaggttttcataagatgatatgtgtgcaagagatcagtaatctgcaaatgggaaagatggctggttctgtgagaccaggctgttcctggtcccagctaagacattgcagtacccacctcccaaagggagtacacccttgctttgggcctgtgcctgcctgagtcctgatccgtcttccttcctaccctgcccccggcccccttctctttctgcagacaaactggtcaagtgtgagggcatcagcctgctggctcagaacacctcgtggctgctgctgctcctgctgtccctctccctcctccaggccacggatttcatgtccctgtgactggtggggcccatggaggagacaggaagcctcaagttccagtgcagagatcctacttctctgagtcagctgaccccctccccccaatccctcaaaccttgaggagaagtggggaccccacccctcatcaggagttccagtgctgcatgcgattatctacccacgtccacgcggccacctcaccctctccgcacacctctggctgtctttttgtactttttgttccagagctgcttctgtctggtttatttaggttttatccttccttttctttgagagttcgtgaagagggaagccaggattggggacctgatggagagtgagagcatgtgaggggtagtgggatggtggggtaccagccactggaggggtcatccttgcccatcgggaccagaaacctgggagagacttggatgaggagtggttgggctgtgctgggcctagcacggacatggtctgtcctgacagcactcctcggcaggcatggctggtgcctgaagaccccagatgtgagggcaccaccaagaatttgtggcctaccttgtgagggagagaactgaggatctccagcattctcagccacaaccaaaaaaaaataaaaagggcagccctccttaccactgtggaagtccctcagaggccttggggcatgacccagtgaagatgcaggtttgaccaggaaagcagcgctagtggagggttggagaaggaggtaaaggatgagggttcatcatccctccctgcctaaggaagctaaaagcatggccctgctgcccctccctgcctccacccacagtggagagggctacaaaggaggacaagaccctctcaggctgtcccaagctcccaagagcttccagagctctgacccacagcctccaagtcaggtggggtggagtcccagagctgcacagggtttggcccaagtttctaagggaggcacttcctcccctcgcccatcagtgccagcccctgctggctggtgcctgagcccctcagacagccccctgccccgcaggcctgccttctcagggacttctgcggggcctgaggcaagccatggagtgagacccaggagccggacacttctcaggaaatggcttttcccaacccccagcccccacccggtggttcttcctgttctgtgactgtgtatagtgccaccacagcttatggcatctcattgaggacaaagaaaactgcacaataaaaccaagcctctggaatctgtcctcgtgtccacctggccttcgctcctccagcagtgcctgcctgcccccgctt

SEQ ID NO: 383 - DNA, 1549 bp, Homo sapiens; identical to SEQ ID NO: 118

SEQ ID NO: 384 - DNA, 4656 bp, Homo sapiens; identical to SEQ ID NO: 119

SEQ ID NO: 385 - DNA, 2353 bp, Homo sapiens; identical to SEQ ID NO: 120

SEQ ID NO: 386 - DNA, 6378 bp, Homo sapiens
cccattactgttggagctacagggagagaaacaggaggagactgcaagagatcatttgggaaggccgtgggcacgctctttactccatgtgtgggacattcattgcggaataacatcggaggagaagtttcccagagctatggggacttcccatccggcgttcctggtcttaggctgtcttctcacagggctgagcctaatcctctgccagctttcattaccctctatccttccaaatgaaaatgaaaaggttgtgcagctgaattcatccttttctctgagatgctttggggagagtgaagtgagctggcagtaccccatgtctgaagaagagagctccgatgtggaaatcagaaatgaagaaaacaacagcggcctttttgtgacggtcttggaagtgagcagtgcctcggcggcccacacagggttgtacacttgctattacaaccacactcagacagaagagaatgagcttgaaggcaggcacatttacatctatgtgccagacccagatgtagcctttgtacctctaggaatgacggattatttagtcatcgtggaggatgatgattctgccattataccttgtcgcacaactgatcccgagactcctgtaaccttacacaacagtgagggggtggtacctgcctcctacgacagcagacagggctttaatgggaccttcactgtagggccctatatctgtgaggccaccgtcaaaggaaagaagttccagaccatcccatttaatgtttatgctttaaaagcaacatcagagctggatctagaaatggaagctcttaaaaccgtgtataagtcaggggaaacgattgtggtcacctgtgctgtttttaacaatgaggtggttgaccttcaatggacttaccctggagaagtgaaaggcaaaggcatcacaatgctggaagaaatcaaagtcccatccatcaaattggtgtacactttgacggtccccgaggccacggtgaaagacagtggagattacgaatgtgctgcccgccaggctaccagggaggtcaaagaaatgaagaaagtcactatttctgtccatgagaaaggtttcattgaaatcaaacccaccttcagccagttggaagctgtcaacctgcatgaagtcaaacattttgttgtagaggtgcgggcctacccacctcccaggatatcctggctgaaaaacaatctgactctgattgaaaatctcactgagatcaccactgatgtggaaaagattcaggaaataaggtatcgaagcaaattaaagctgatccgtgctaaggaagaagacagtggccattatactattgtagctcaaaatgaagatgctgtgaagagctatacttttgaactgttaactcaagttccttcatccattctggacttggtcgatgatcaccatggctcaactgggggacagacggtgaggtgcacagctgaaggcacgccgcttcctgatattgagtggatgatatgcaaagatattaagaaatgtaataatgaaacttcctggactattttggccaacaatgtctcaaacatcatcacggagatccactcccgagacaggagtaccgtggagggccgtgtgactttcgccaaagtggaggagaccatcgccgtgcgatgcctggctaagaatctccttggagctgagaaccgagagctgaagctggtggctcccaccctgcgttctgaactcacggtggctgctgcagtcctggtgctgttggtgattgtgatcatctcacttattgtcctggttgtcatttggaaacagaaaccgaggtatgaaattcgctggagggtcattgaatcaatcagcccggatggacatgaatatatttatgtggacccgatgcagctgccttatgactcaagatgggagtttccaagagatggactagtgcttggtcgggtcttggggtctggagcgtttgggaaggtggttgaaggaacagcctatggattaagccggtcccaacctgtcatgaaagttgcagtgaagatgctaaaacccacggccagatccagtgaaaaacaagctctcatgtctgaactgaagataatgactcacctggggccacatttgaacattgtaaacttgctgggagcctgcaccaagtcaggccccatttacatcatcacagagtattgcttctatggagatttggtcaactatttgcataagaatagggatagcttcctgagccaccacccagagaagccaaagaaagagctggatatctttggattgaaccctgctgatgaaagcacacggagctatgttattttatcttttgaaaacaatggtgactacatggacatgaagcaggctgatactacacagtatgtccccatgctagaaaggaaagaggtttctaaatattccgacatccagagatcactctatgatcgtccagcctcatataagaagaaatctatgttagactcagaagtcaaaaacctcctttcagatgataactcagaaggccttactttattggatttgttgagcttcacctatcaagttgcccgaggaatggagtttttggcttcaaaaaattgtgtccaccgtgatctggctgctcgcaacgtcctcctggcacaaggaaaaattgtgaagatctgtgactttggcctggccagagacatcatgcatgattcgaactatgtgtcgaaaggcagtacctttctgcccgtgaagtggatggctcctgagagcatctttgacaacctctacaccacactgagtgatgtctggtcttatggcattctgctctgggagatcttttcccttggtggcaccccttaccccggcatgatggtggattctactttctacaataagatcaagagtgggtaccggatggccaagcctgaccacgctaccagtgaagtctacgagatcatggtgaaatgctggaacagtgagccggagaagagaccctccttttaccacctgagtgagattgtggagaatctgctgcctggacaatataaaaagagttatgaaaaaattcacctggacttcctgaagagtgaccatcctgctgtggcacgcatgcgtgtggactcagacaatgcatacattggtgtcacctacaaaaacgaggaagacaagctgaaggactgggagggtggtctggatgagcagagactgagcgctgacagtggctacatcattcctctgcctgacattgaccctgtccctgaggaggaggacctgggcaagaggaacagacacagctcgcagacctctgaagagagtgccattgagacgggttccagcagttccaccttcatcaagagagaggacgagaccattgaagacatcgacatgatggacgacatcggcatagactcttcagacctggtggaagacagcttcctgtaactggcggattcgaggggttccttccacttctggggccacctctggatcccgttcagaaaaccactttattgcaatgcggaggttgagaggaggacttggttgatgtttaaagagaagttcccagccaagggcctcggggagcgttctaaatatgaatgaatgggatattttgaaatgaactttgtcagtgttgcctctcgcaatgcctcagtagcatctcagtggtgtgtgaagtttggagatagatggataagggaataataggccacagaaggtgaactttgtgcttcaaggacattggtgagagtccaacagacacaatttatactgcgacagaacttcagcattgtaattatgtaaataactctaaccaaggctgtgtttagattgtattaactatcttctttggacttctgaagagaccactcaatccatccatgtacttccctcttgaaacctgatgtcagctgctgttgaactttttaaagaagtgcatgaaaaaccatttttgaaccttaaaaggtactggtactatagcattttgctatcttttttagtgttaagagataaagaataataattaaccaaccttgtttaatagatttgggtcatttagaagcctgacaactcattttcatattgtaatctatgtttataatactactactgttatcagtaatgctaaatgtgtaataatgtaacatgatttccctccagagaaagcacaatttaaaacaatccttactaagtaggtgatgagtttgacagtttttgacatttatattaaataacatgtttctctataaagtatggtaatagctttagtgaattaaatttagttgagcatagagaacaaagtaaaagtagtgttgtccaggaagtcagaatttttaactgtactgaataggttccccaatccatcgtattaaaaaacaattaactgccctctgaaataatgggattagaaacaaacaaaactcttaagtcctaaaagttctcaatgtagaggcataaacctgtgctgaacataacttctcatgtatattacccaatggaaaatataatgatcagcaaaaagactggatttgcagaagttttttttttttttcttcatgcctgatgaaagctttggcaaccccaatatatgtattttttgaatctatgaacctgaaaagggtcagaaggatgcccagacatcagcctccttctttcaccccttaccccaaagagaaagagtttgaaactcgagaccataaagatattctttagtggaggctggatgtgcattagcctggatcctcagttctcaaatgtgtgtggcagccaggatgactagatcctgggtttccatccttgagattctgaagtatgaagtctgagggaaaccagagtctgtatttttctaaactccctggctgttctgatcggccagttttcggaaacactgacttaggtttcaggaagttgccatgggaaacaaataatttgaactttggaacagggttggaattcaaccacgcaggaagcctactatttaaatccttggcttcaggttagtgacatttaatgccatctagctagcaattgcgaccttaatttaactttccagtcttagctgaggctgagaaagctaaagtttggttttgacaggttttccaaaagtaaagatgctacttcccactgtatgggggagattgaactttccccgtctcccgtcttctgcctcccactccataccccgccaaggaaaggcatgtacaaaaattatgcaattcagtgttccaagtctctgtgtaaccagctcagtgttttggtggaaaaaacattttaagttttactgataatttgaggttagatgggaggatgaattgtcacatctatccacactgtcaaacaggttggtgtgggttcattggcattctttgcaatactgcttaattgctgataccatatgaatgaaacatgggctgtgattactgcaatcactgtgctatcggcagatgatgctttggaagatgcagaagcaataataaagtacttgactacctactggtgtaatctcaatgcaagccccaactttcttatccaactttttcatagtaagtgcgaagactgagccagattggccaattaaaaacgaaaacctgactaggttctgtagagccaattagacttgaaatacgtttgtgtttctagaatcacagctcaagcattctgtttatcgctcactctcccttgtacagccttattttgttggtgctttgcattttgatattgctgtgagccttgcatgacatcatgaggccggatgaaacttctcagtccagcagtttccagtcctaacaaatgctcccacctgaatttgtatatgactgcatttgtgggtgtgtgtgtgttttcagcaaattccagatttgtttccttttggcctcctgcaaagtctccagaagaaaatttgccaatctttcctactttctatttttatgatgacaatcaaagccggcctgagaaacactatttgtgactttttaaacgattagtgatgtccttaaaatgtggtctgccaatctgtacaaaatggtcctatttttgtgaagagggacataagataaaatgatgttatacatcaatatgtatatatgtatttctatatagacttggagaatactgccaaaacatttatgacaagctgtatcactgccttcgtttatatttttttaactgtgataatccccacaggcacattaactgttgcacttttgaatgtccaaaatttatattttagaaataataaaaagaaagatacttacatgttcccaaaacaatggtgtggtgaatgtgtgagaaaaactaacttgatagggtctaccaatacaaaatgtattacgaatgcccctgttcatgtttttgttttaaaacgtgtaaatgaagatctttatatttcaataaatgatatataatttaaagtt

SEQ ID NO: 387 - DNA, 4910 bp, Homo sapiens
tagacgcaccctctgaagatggtgactccctcctgagaagctggaccccttggtaaaagacaaggccttctccaagaagaatatgaaagtgttactcagacttatttgtttcatagctctactgatttcttctctggaggctgataaatgcaaggaacgtgaagaaaaaataattttagtgtcatctgcaaatgaaattgatgttcgtccctgtcctcttaacccaaatgaacacaaaggcactataacttggtataaagatgacagcaagacacctgtatctacagaacaagcctccaggattcatcaacacaaagagaaactttggtttgttcctgctaaggtggaggattcaggacattactattgcgtggtaagaaattcatcttactgcctcagaattaaaataagtgcaaaatttgtggagaatgagcctaacttatgttataatgcacaagccatatttaagcagaaactacccgttgcaggagacggaggacttgtgtgcccttatatggagttttttaaaaatgaaaataatgagttacctaaattacagtggtataaggattgcaaacctctacttcttgacaatatacactttagtggagtcaaagataggctcatcgtgatgaatgtggctgaaaagcatagagggaactatacttgtcatgcatcctacacatacttgggcaagcaatatcctattacccgggtaatagaatttattactctagaggaaaacaaacccacaaggcctgtgattgtgagcccagctaatgagacaatggaagtagacttgggatcccagatacaattgatctgtaatgtcaccggccagttgagtgacattgcttactggaagtggaatgggtcagtaattgatgaagatgacccagtgctaggggaagactattacagtgtggaaaatcctgcaaacaaaagaaggagtaccctcatcacagtgcttaatatatcggaaattgaaagtagattttataaacatccatttacctgttttgccaagaatacacatggtatagatgcagcatatatccagttaatatatccagtcactaatttccagaagcacatgattggtatatgtgtcacgttgacagtcataattgtgtgttctgttttcatctataaaatcttcaagattgacattgtgctttggtacagggattcctgctatgattttctcccaataaaagcttcagatggaaagacctatgacgcatatatactgtatccaaagactgttggggaagggtctacctctgactgtgatatttttgtgtttaaagtcttgcctgaggtcttggaaaaacagtgtggatataagctgttcatttatggaagggatgactacgttggggaagacattgttgaggtcattaatgaaaacgtaaagaaaagcagaagactgattatcattttagtcagagaaacatcaggcttcagctggctgggtggttcatctgaagagcaaatagccatgtataatgctcttgttcaggatggaattaaagttgtcctgcttgagctggagaaaatccaagactatgagaaaatgccagaatcgattaaattcattaagcagaaacatggggctatccgctggtcaggggactttacacagggaccacagtctgcaaagacaaggttctggaagaatgtcaggtaccacatgccagtccagcgacggtcaccttcatctaaacaccagttactgtcaccagccactaaggagaaactgcaaagagaggctcacgtgcctctcgggtagcatggagaagttgccaagagttctttaggtgcctcctgtcttatggcgttgcaggccaggttatgcctcatgctgacttgcagagttcatggaatgtaactatatcatcctttatccctgaggtcacctggaatcagattattaagggaataagccatgacgtcaatagcagcccagggcacttcagagtagagggcttgggaagatcttttaaaaaggcagtaggcccggtgtggtggctcacgcctataatcccagcactttgggaggctgaagtgggtggatcaccagaggtcaggagttcgagaccagcccagccaacatggcaaaaccccatctctactaaaaatacaaaaatgagctaggcatggtggcacacgcctgtaatcccagctacacctgaggctgaggcaggagaattgcttgaaccggggagacggaggttgcagtgagccgagtttgggccactgcactctagcctggcaacagagcaagactccgtctcaaaaaaagggcaataaatgccctctctgaatgtttgaactgccaagaaaaggcatggagacagcgaactagaagaaagggcaagaaggaaatagccaccgtctacagatggcttagttaagtcatccacagcccaagggcggggctatgccttgtctggggaccctgtagagtcactgaccctggagcggctctcctgagaggtgctgcaggcaaagtgagactgacacctcactgaggaagggagacatattcttggagaactttccatctgcttgtattttccatacacatccccagccagaagttagtgtccgaagaccgaattttattttacagagcttgaaaactcacttcaatgaacaaagggattctccaggattccaaagttttgaagtcatcttagctttccacaggagggagagaacttaaaaaagcaacagtagcagggaattgatccacttcttaatgctttcctccctggcatgaccatcctgtcctttgttattatcctgcattttacgtctttggaggaacagctccctagtggcttcctccgtctgcaatgtcccttgcacagcccacacatgaaccatccttcccatgatgccgctcttctgtcatcccgctcctgctgaaacacctcccaggggctccacctgttcaggagctgaagcccatgctttcccaccagcatgtcactcccagaccacctccctgccctgtcctccagcttcccctcgctgtcctgctgtgtgaattcccaggttggcctggtggccatgtcgcctgcccccagcactcctctgtctctgctcttgcctcgacccttcctcctcctttgcctaggaggccttctcgcattttctctagctgatcagaattttaccaaaattcagaacatcctccaattccacagtctctgggagactttccctaagaggcgacttcctctccagccttctctctctggtcaggcccactgcagagatggtggtgagcacatctgggaggctggtctccctccagctggaattgctgctctctgagggagaggctgtggtggctgtctctgtccctcactgccttccaggagcaatttgcacatgtaacatagatttatgtaatgctttatgtttaaaaacattccccaattatcttatttaatttttgcaattattctaattttatatatagagaaagtgacctattttttaaaaaaatcacactctaagttctattgaacctaggacttgagcctccatttctggcttctagtctggtgttctgagtacttgatttcaggtcaataacggtcccccctcactccacactggcacgtttgtgagaagaaatgacattttgctaggaagtgaccgagtctaggaatgcttttattcaagacaccaaattccaaacttctaaatgttggaattttcaaaaattgtgtttagattttatgaaaaactcttctactttcatctattctttccctagaggcaaacatttcttaaaatgtttcattttcattaaaaatgaaagccaaatttatatgccaccgattgcaggacacaagcacagttttaagagttgtatgaacatggagaggacttttggtttttatatttctcgtatttaatatgggtgaacaccaacttttatttggaataataattttcctcctaaacaaaaacacattgagtttaagtctctgactcttgcctttccacctgctttctcctgggcccgctttgcctgcttgaaggaacagtgctgttctggagctgctgttccaacagacagggcctagctttcatttgacacacagactacagccagaagcccatggagcagggatgtcacgtcttgaaaagcctattagatgttttacaaatttaattttgcagattattttagtctgtcatccagaaaatgtgtcagcatgcatagtgctaagaaagcaagccaatttggaaacttaggttagtgacaaaattggccagagagtgggggtgatgatgaccaagaattacaagtagaatggcagctggaatttaaggagggacaagaatcaatggataagcgtgggtggaggaagatccaaacagaaaagtgcaaagttattccccatcttccaagggttgaattctggaggaagaagacacattcctagttccccgtgaacttcctttgacttattgtccccactaaaacaaaacaaaaaacttttaatgccttccacattaattagattttcttgcagtttttttatggcatttttttaaagatgccctaagtgttgaagaagagtttgcaaatgcaacaaaaatatttaattaccggttgttaaaactggtttagcacaatttatattttccctctcttgcctttcttatttgcaataaaaggtattgagccattttttaaatgacatttttgataaattatgtttgtactagttgatgaaggagttttttttaacctgtttatataattttgcagcagaagccaaattttttgtatattaaagcaccaaattcatgtacagcatgcatcacggatcaatagactgtacttattttccaataaaattttcaaactttgtactgttaaa

SEQ ID NO: 388 - DNA, 899 bp, Homo sapiens
ttttctttagattgggatgcttggaaggtgtgtctacgacttcgagataatggacttctggccaagccaacccatggcgacattatcaggtttgcgcctccgctggtgatcaaggaggatgagcttcgagagtccattgaaattattaacaagaccatcttgtctttctgagggtagccagctgttttcagtggtccctgggagccagctggagacaggtggtcctgtaaaagctttattcctaatgtgggcacattccactcccatgagtcttcaaaaactttttttttgaatatatttttttcagttgatacataatagaacaacgtttatgaacctgccgtttgctttgtaacgtaactaaataatgtaatggcatctatattcagttgaagtgttttgatgtgcatgtgtacttcctaaggtgaaatgcatctatatacagacagcctctaaatcaagtccttcagtataattgatatatgtttttataatttcctcactggtataagtgtttcatatttgaaaaagttatctctgggtattgcataaaaggcttcatcttataaagtgaaatcattgttattgaattttaggaaggattaatggttaagtgtatataaaatactaatattaagtaaacttcatattggccaacaccagggttgtattctatggatgtcattattttgaattaagaattagtgtttaacattcctaaattgttttgagtgcttgattataatttgtaaaaaatgtttattttcaatacttctttaaatttaaaataaagcttatatttcaaatgtctgttttgtgatgattattcaccttaaaaggaagaagctgaggcaaaattaatatagaatgtttaggtgggccaaggttggggagctgca

SEQ ID NO: 389 - DNA, 1104 bp, Homo sapiens; identical to SEQ ID NO: 121

SEQ ID NO: 390 - DNA, 1677 bp, Homo sapiens
tgtcacccaggctggagtgcagtggcgcaatctcagctcactgcaacctccacctccctggttcaagcgattctcctgcctcctccgcccgacgccccgcgtcccccgccgcgccgccgccgccaccctctgcgccccgcgccgccccccggtcccgcccgccatgcccggcccggccgcgggcagcagggcccgggtctacgccgaggtgaacagtctgaggagccgcgagtactgggactacgaggctcacgtcccgagctggggtaatcaagatgattaccaactggttcgaaaacttggtcggggaaaatatagtgaagtatttgaggccattaatatcaccaacaatgagagagtggttgtaaaaatcctgaagccagtgaagaaaaagaagataaaacgagaggttaagattctggagaaccttcgtggtggaacaaatatcattaagctgattgacactgtaaaggaccccgtgtcaaagacaccagctttggtatttgaatatatcaataatacagattttaagcaactctaccagatcctgacagactttgatatccggttttatatgtatgaactacttaaagctctggattactgccacagcaagggaatcatgcacagggatgtgaaacctcacaatgtcatgatagatcaccaacagaaaaagctgcgactgatagattggggtctggcagaattctatcatcctgctcaggagtacaatgttcgtgtagcctcaaggtacttcaagggaccagagctcctcgtggactatcagatgtatgattatagcttggacatgtggagtttgggctgtatgttagcaagcatgatctttcgaagggaaccattcttccatggacaggacaactatgaccagcttgttcgcattgccaaggttctgggtacagaagaactgtatgggtatctgaagaagtatcacatagacctagatccacacttcaacgatatcctgggacaacattcacggaaacgctgggaaaactttatccatagtgagaacagacaccttgtcagccctgaggccctagatcttctggacaaacttctgcgatacgaccatcaacagagactgactgccaaagaggccatggagcacccatacttctaccctgtggtgaaggagcagtcccagccttgtgcagacaatgctgtgctttccagtggtctcacggcagcacgatgaagactggaaagcgacgggtctgttgcggttctcccacttttccataagcagaacaagaaccaaatcaaacgtcttaacgcgtatagagagatcacgttccgtgagcagacacaaaacggtggcaggtttggcgagcacgaactagaccaagcgaagggcagcccaccaccgtatatcaaacctcacttccgaatgtaaaaggctcacttgcctttggcttcctgttgacttcttcccgacccagaaagcatggggaatgtgaagggtatgcagaatgttgttggttactgttgctccccgagcccctcaactcgtcccgtggccgcctgtttttccagcaaaccacgctaactagctgaccacagactccacagtggggggacgggcgcagtatgtggcatggcggcagttacatattattattttaaaagtatatattattgaataaaaggttttaaaag

SEQ ID NO: 391 - DNA, 2134 bp, Homo sapiens
acccaagccagcactggctcatactgattcattttgatctctgctaataccagagtcctgcgtggcagagccattggcaccagaaattacaagagaacatggccaagcgagttgccattgtgggagctggggtcagcggcctggcctccatcaagtgctgtctggaagaaggactggagcccacctgctttgagaggagcgatgaccttggggggctgtggagattcaccgaacatgttgaagaaggcagagccagtctctacaagtctgtggtttccaacagctgcaaggagatgtcttgttactcagactttccattcccagaagattatccaaactatgtgccaaattctcaattcctggaatatctcaaaatgtatgcaaaccactttgaccttctgaaacacattcaattcaagaccaaagtctgcagtgtaacaaaatgctcagattctgctgtctctggccaatgggaggtggtcactatgcatgaagagaagcaagagtcagccatctttgatgctgtcatggtctgcactggctttcttactaatccttatttgccactggattcctttccaggtattaatgcctttaaaggccagtactttcatagccggcaatataagcatccagatatatttaaggacaagagagtccttgtgattggaatgggaaattctggcacagacattgctgtggaggccagccacctggcggaaaaggtgttcctcagcaccaccggagggggatgggtgatcagccgaatctttgactcgggctacccatgggacatggtgttcatgacacgctttcagaacatgttgagaaattccctcccaaccccaattgtgacttggttgatggagcgaaagataaacaactggctcaatcatgcaaattacggcttaataccagaagacaggactcagctgaaagagtttgtgctaaatgatgagctcccaggacgcatcatcactgggaaagtgttcatcaggccaagcataaaagaggtaaaggaaaactctgtcatatttaacaatacttcaaaggaagagcctattgacatcattgtctttgccactggatacacatttgctttccccttccttgatgagtctgtagtgaaagttgaagatggccaggcctcactgtacaagtatatcttccctgcacatctgcaaaagccaaccctggccattattggcctcatcaaacccttgggctccatgatacctacaggagaaacacaagctcggtgggctgttcgagtcctgaaaggtgtaaataagttaccaccaccaagtgtcatgatagaggaaattaatgcaaggaaagaaaacaagcccagttggtttggcttgtgctactgcaaggctttacaatcagattatatcacatacatagatgaactcctgacctatatcaatgcaaaacccaacctgttctctatgctcctaacggatccacatctggctctgaccgtcttctttggcccatgctcaccataccagttccgcttgactggcccaggaaaatgggaaggagccagaaatgccatcatgacccagtgggaccgaacattcaaggtcatcaaagctcgagttgtacaagagtctccatctccctttgaaagttttcttaaagtctttagctttctggctttgcttgtggctatttttctgattttcctataagtaaaagatctcctaaatggaagatgcacagagtagatttacaatgctccaattcctctcttacagcaatattgccttcacagttataaactgtattcaaatagtaaaggccaccctctcgcttccctggctggccccagggctaccactggtattcctgagcctctcccagctccacttctaatgctagagaatgataactaagacttctgtgcatttgaaggttgttggaaagttacaggttcattttagaaagaaagctgttcttgacagcactctgagccatcatacctctttcccatataaactattttcacagatctcaactaaaaccccttacttcacaaatgattgtgttgtgctgaaatggtgctcttatagtactggcttattaaaagtaaaaaataaacctaaaaattgattgttttaaaaaaaaa

SEQ ID NO: 392 - DNA, 3829 bp, Homo sapiens
aaggatggcacagggctggtgccctcggagcgtgtcctggtggggccccagcggctgcaggtgctgaatgcctcccacgaggactccggggcctacagctgccggcagcggctcacgcagcgcgtactgtgccacttcagtgtgcgggtgacagacgctccatcctcgggagatgacgaagacggggaggacgaggctgaggacacaggtgtggacacaggggccccttactggacacggcccgagcggatggacaagaagctgctggccgtgccggccgccaacaccgtccgcttccgctgcccagccgctggcaaccccactccctccatctcctggctgaagaacggcagggagttccgcggcgagcaccgcattggaggcatcaagctgcggcatcagcagtggagcctggtcatggaaagcgtggtgccctcggaccgcggcaactacacctgcgtcgtggagaacaagtttggcagcatccggcagacgtacacgctggacgtgctggagcgctccccgcaccggcccatcctgcaggcggggctgccggccaaccagacggcggtgctgggcagcgacgtggagttccactgcaaggtgtacagtgacgcacagccccacatccagtggctcaagcacgtggaggtgaatggcagcaaggtgggcccggacggcacaccctacgttaccgtgctcaagacggcgggcgctaacaccaccgacaaggagctagaggttctctccttgcacaacgtcacctttgaggacgccggggagtacacctgcctggcgggcaattctattgggttttctcatcactctgcgtggctggtggtgctgccagccgaggaggagctggtggaggctgacgaggcgggcagtgtgtatgcaggcatcctcagctacggggtgggcttcttcctgttcatcctggtggtggcggctgtgaccgtctgccgcctgcgcagcccccccaagaaaggcctgggctcccccaccgtgcacaagatctcccgcttcccgctcaagcgacaggtgtccctggagtccaacgcgtccatgagctccaacacaccactggtgcgcatcgcaaggctgtcctcaggggagggccccacgctggccaatgtctccgagctcgagctgcctgccgaccccaaatgggagctgtctcgggcccggctgaccctgggcaagccccttggggagggctgcttcggccaggtggtcatggcggaggccatcggcattgacaaggaccgggccgccaagcctgtcaccgtagccgtgaagatgctgaaagacgatgccactgacaaggacctgtcggacctggtgtctgagatggagatgatgaagatgatcgggaaacacaaaaacatcatcaacctgctgggcgcctgcacgcagggcgggcccctgtacgtgctggtggagtacgcggccaagggtaacctgcgggagtttctgcgggcgcggcggcccccgggcctggactactccttcgacacctgcaagccgcccgaggagcagctcaccttcaaggacctggtgtcctgtgcctaccaggtggcccggggcatggagtacttggcctcccagaagtgcatccacagggacctggctgcccgcaatgtgctggtgaccgaggacaacgtgatgaagatcgcagacttcgggctggcccgggacgtgcacaacctcgactactacaagaagacaaccaacggccggctccccgtgaagtggatggcgcctgaggccttgtttgaccgagtctacactcaccagagtgacgtctggtcctttggggtcctgctctgggagatcttcacgctggggggctccccgtaccccggcatccctgtggaggagctcttcaagctgctgaaggagggccaccgcatggacaagcccgccaactgcacacacgacctgtacatgatcatgcgggagtgctggcatgccgcgccctcccagaggcccaccttcaagcagctggtggaggacctggaccgtgtccttaccgtgacgtccaccgacgagtacctggacctgtcggcgcctttcgagcagtactccccgggtggccaggacacccccagctccagctcctcaggggacgactccgtgtttgcccacgacctgctgcccccggccccacccagcagtgggggctcgcggacgtgaagggccactggtccccaacaatgtgaggggtccctagcagcccaccctgctgctggtgcacagccactccccggcatgagactcagtgcagatggagagacagctacacagagctttggtctgtgtgtgtgtgtgtgcgtgtgtgtgtgtgtgtgcacatccgcgtgtgcctgtgtgcgtgcgcatcttgcctccaggtgcagaggtaccctgggtgtccccgctgctgtgcaacggtctcctgactggtgctgcagcaccgaggggcctttgttctggggggacccagtgcagaatgtaagtgggcccacccggtgggaccccgtggggcagggagctgggcccgacatggctcggcctctgcctttgcaccacgggacatcacagggtgcgctcggcccctcccacacccaaagctgagcctgcagggaagccccacatgtccagcaccttgtgcctggggtgttagtggcaccgcctccccacctccaggctttcccacttcccaccctgcccctcagagactgaaattacgggtacctgaagatgggagcctttaccttttatgcaaaaggtttattccggaaactagtgtacatttctataaatagatgctgtgtatatggtatatatacatatatatatataacatatatggaagaggaaaaggctggtacaacggaggcctgcgaccctgggggcacaggaggcaggcatggccctgggcggggcgtgggggggcgtggagggaggccccaggggtctcacccatgcaagcagaggaccagggctttttctggcaccgcagttttgttttaaaactggacctgtatatttgtaaagctatttatgggcccctggcactcttgttcccacaccccaacacttccagcatttagctggccacatggcggagagttttaatttttaacttattgacaaccgagaaggtttatcccgccgatagagggacggccaagaatgtacgtccagcctgccccggagctggaggatcccctccaagcctaaaaggttgttaatagttggaggtgattccagtgaagatattttatttgctttgtcctttttcaggagaattagatttctataggatttttctttaggagatttattttttggacttcaaagcaagctggtattttcatacaaattcttctaattgctgtgtgtcccaggcagggagacggtttccagggaggggccggccctgtgtgcaggttccgatgttattagatgttacaagtttatatatatctatatatataatttattgagtttttacaagatgtatttgttgtagacttaacacttcttacgcaatgcttctagagttttatagcctggactgctacctttcaaagcttggagggaagccgtgaattcagttggttcgttctgtactgttactgggccctgagtctgggcagctgtcccttgcttgcctgcagggccatggctcagggtggtctcttcttggggcccagtgcatggtggccagaggtgtcacccaaaccggcaggtgcgattttgttaacccagcgacgaactttccgaaaaataaagacacctggttgctaacctgaaaaaaaaaaaaaaaaaaaaaaaaaaaaaa

SEQ ID NO: 393 - DNA, 1740 bp, Homo sapiens
ctccacgttctgctcccactcgctctcctgtccccttcccctcccctcccggcgcaaagccccccgaaaccaacaaagctgagccgagagaaacaaacaaaacaaacacaccgggccagacaagccatcgacaaaactttgcaaaagcaaaaacaaaaaaggaaaaactaaccaacctcaaccaaccagcccccgagccacccggggcgccctcccgcgccctcttgcaccctcgcacacacaaaaggcggcgcgccggagcccgagacccggggagccgccgccgccccgccgccgcccgcagccaggggagcaggaagtccggacgcagcccccatagatatggcaatggtagtcagcacgtggcgcgacccccaggacgaggtgcccggctcacagggcagccaggcctcgcaggcgccgcccgtgcccggcccgccgcccggcgccccgcacacgccacagacgcccggccaagggggcccagccagcacgccagcccagacggcggccggtggccagggcggccctggcggcccgggtagcgacaagcagcagcagcagcaacacatcgagtgcgtggtgtgcggagacaagtcgagcggcaagcactacggccagttcacgtgcgagggctgcaagagcttcttcaagcgcagcgtgcggaggaacctgagctacacgtgccgcgccaaccggaactgtcccatcgaccagcaccatcgcaaccagtgccagtactgccgcctcaaaaagtgcctcaaagtgggcatgagacgggaagcggtgcagaggggcaggatgccgccgacccagccgacccacgggcagttcgcgctgaccaacggggatcccctcaactgccactcgtacctgtccggatatatttccctgctgttgcgcgcggagccctatcccacgtcgcgcttcggcagccaatgcatgcagcccaacaacatcatgggtatcgagaacatttgcgaactggccgcgaggatgctcttcagcgccgtcgagtgggcccggaacatccccttcttccccgacctgcagatcacggaccaggtggccctgcttcgcctcacctggagcgagctgtttgtgttgaatgcggcgcagtgctccatgcccctccacgtcgccccgctcctggccgccgccggcctgcatgcttcgcccatgtccgccgaccgggtggtcgcctttatggaccacatacggatcttccaagagcaagtggagaagctcaaggcgctgcacgttgactcagccgagtacagctgcctcaaggccatagtcctgttcacctcagatgcctgtggtctctctgatgtagcccatgtggaaagcttgcaggaaaagtctcagtgtgctttggaagaatacgttaggagccagtaccccaaccagccgacgagattcggaaagcttttgcttcgcctcccttccctccgcaccgtctcctcctcagtcatagagcaattgtttttcgtccgtttggtaggtaaaacccccatcgaaaccctcatccgggatatgttactgtccggcagcagttttaactggccgtatatggcaattcaataaataaataaaataagaagggggagtgaaacagagaaagaaaaggcaaaagactggtttgtttgcttaatttccttctgttaagaaaggatataaaaggatgttacaagtttgctaaaagaagagaggggaagaatttaatggactgtgaatttc

SEQ ID NO: 394 - DNA, 3762 bp, Homo sapiens; identical to SEQ ID NO: 122

SEQ ID NO: 395 - DNA, 15571 bp, Homo sapiens; identical to SEQ ID NO: 123

SEQ ID NO: 396 - DNA, 2491 bp, Homo sapiens
ctggcaggcaggactgggatcgaggcccagaaaacggagcagcgggcaccagggaggcctggaacggggcgagcgccatgagcaacaaatgcgacgtggtcgtggtggggggcggcatctcaggtatggcagcagccaaacttctgcatgactctggactgaatgtggttgttctggaagcccgggaccgtgtgggaggcaggacttacactcttaggaaccaaaaggttaaatatgtggaccttggaggatcctatgttggaccaacccagaatcgtatcttgagattagccaaggagctaggattggagacctacaaagtgaatgaggttgagcgtctgatccaccatgtaaagggcaaatcataccccttcagggggccattcccacctgtatggaatccaattacctacttagatcataacaacttttggaggacaatggatgacatggggcgagagattccgagtgatgccccatggaaggctccccttgcagaagagtgggacaacatgacaatgaaggagctactggacaagctctgctggactgaatctgcaaagcagcttgccactctctttgtgaacctgtgtgtcactgcagagacccatgaggtctctgctctctggttcctgtggtatgtgaagcagtgtggaggcacaacaagaatcatctcgacaacaaatggaggacaggagaggaaatttgtgggcggatctggtcaagtgagtgagcggataatggacctccttggagaccgagtgaagctggagaggcctgtgatctacattgaccagacaagagaaaatgtccttgtggagaccctaaaccatgagatgtatgaggctaaatatgtgattagtgctattcctcctactctgggcatgaagattcacttcaatccccctctgccaatgatgagaaaccagatgatcactcgtgtgcctttgggttcagtcatcaagtgtatagtttattataaagagcctttctggaggaaaaaggattactgtggaaccatgattattgatggagaagaagctccagttgcctacacgttggatgataccaaacctgaaggcaactatgctgccataatgggatttatcctggcccacaaagccagaaaactggcacgtcttaccaaagaggaaaggttgaagaaactttgtgaactctatgccaaggttctgggttccctagaagctctggagccagtgcattatgaagaaaagaactggtgtgaggagcagtactctgggggctgctacacaacttatttcccccctgggatcctgactcaatatggaagggttctacgccagccagtggacaggatttactttgcaggcaccgagactgccacacactggagcggctacatggagggggctgtagaggccggggagagagcagcccgagagatcctgcatgccatggggaagattccagaggatgaaatctggcagtcagaaccagagtctgtggatgtccctgcacagcccatcaccaccacctttttggagagacatttgccctccgtgccaggcctgctcaggctgattggattgaccaccatcttttcagcaacggctcttggcttcctggcccacaaaagggggctacttgtgagagtctaaagagagagggtgtctgtaatcacactctcttcttactgtatttgggatatgagtttggggaaagagttgcaagtaaagttccatgaagacaaatagtgtggagtgaggcgggggagcatgaagataaatccaactctgactgtaaaatacaatggtatctctttctccgttgtggcccctgcttagtgtcccttacctggcttagcgttctgtttcaccagtttccaagtttattgccctcaaatctttagaatagttaaattggcttgtttaaggttcttgctgccccacaacacaccttgcccatgcacaggatgaattttttcctaccattatggctttgtgcttgttcttcctcttacctgtatagcctcacttccctagttctttgcattcgtccttaggtactgtattgttacagctgaaagacagtaaagaccatttagtcctcaccttctgttttagagttgagcaaactgaagcccacagaggtggaacttaattacctaagagccacaataagccactggtatctgggggactagaacacaaataattgcttttcccacctctttggatgttttccccaattatcctccttcactccctgtcatagttaccgatggtgtcccgttgtgtgggtttactctgtgctaagttgtcttacacttctcaaatgctactcagtatatagccttaactcttactgttttgtgcggtgtgtctccagctgattttaacttttttgatggtagaaattttatctcttcttccttttgtatcctccattgtatcttcatacaaaggacagtacacacttgggtaattaaaaataaaagttgattgaccat

SEQ ID NO: 397 - DNA, 1930 bp, Homo sapiens
ggagagagagaggacagagagcaagtcactcccggctgcctttttcacctctgacagagcccagacaccatgaacgcaagtgaattccgaaggagagggaaggagatggtggattacgtggccaactacatggaaggcattgagggacgccaggtctaccctgacgtggagcccgggtacctgcggccgctgatccctgccgctgcccctcaggagccagacacgtttgaggacatcatcaacgacgttgagaagataatcatgcctggggtgacgcactggcacagcccctacttcttcgcctacttccccactgccagctcgtacccggccatgcttgcggacatgctgtgcggggccattggctgcatcggcttctcctgggcggcaagcccagcatgcacagagctggagactgtgatgatggactggctcgggaagatgctggaactaccaaaggcatttttgaatgagaaagctggagaagggggaggagtgatccagggaagtgccagtgaagccaccctggtggccctgctggccgctcggaccaaagtgatccatcggctgcaggcagcgtccccagagctcacacaggccgctatcatggagaagctggtggcttactcatccgatcaggcacactcctcagtggaaagagctgggttaattggtggagtgaaattaaaagccatcccctcagatggcaacttcgccatgcgtgcgtctgccctgcaggaagccctggagagagacaaagcggctggcctgattcctttctttatggttgccaccctggggaccacaacatgctgctcctttgacaatctcttagaagtcggtcctatctgcaacaaggaagacatatggctgcacgttgatgcagcctacgcaggcagtgcattcatctgccctgagttccggcaccttctgaatggagtggagtttgcagattcattcaactttaatccccacaaatggctattggtgaattttgactgttctgccatgtgggtgaaaaagagaacagacttaacgggagcctttagactggaccccacttacctgaagcacagccatcaggattcagggcttatcactgactaccggcattggcagataccactgggcagaagatttcgctctttgaaaatgtggtttgtatttaggatgtatggagtcaaaggactgcaggcttatatccgcaagcatgtccagctgtcccatgagtttgagtcactggtgcgccaggatccccgctttgaaatctgtgtggaagtcattctggggcttgtctgctttcggctaaagggttccaacaaagtgaatgaagctcttctgcaaagaataaacagtgccaaaaaaatccacttggttccatgtcacctcagggacaagtttgtcctgcgctttgccatctgttctcgcacggtggaatctgcccatgtgcagcgggcctgggaacacatcaaagagctggcggccgacgtgctgcgagcagagagggagtaggagtgaagccagctgcaggaatcaaaaattgaagagagatatatctgaaaactggaataagaagcaaataaatatcatcctgccttcatggaactcagctgtctgtggcttcccatgtctttctccaaagccatccagagggttgtgattttgtctgcttagtatctcatcaacaaagaaatattatttgctaattaaaaagttaatcttcatggccatagcttttattcattagctgtgatttttgttgattaaaacattatagattttcatgttcttgcagtcatcagaagtggtaggaaagcctcactgatatattttccagggcaatcaatgttcacgcaacttgaaattatatctgtggtcttcaaattgtcttttgtcatgtggctaaatgcctaataaacaattcaagtga

SEQ ID NO: 398 - DNA, 1519 bp, Homo sapiens
tgtgatttcttttaggatggaagagtgtagaaagtgtcccaaagttggtgtctgaatatatgtccaaaaagataaaagttgatgaatttgtgactcacaatctgtcttttgatgaaatcaacaaagcctttgaactgatgcattctggaaagaggtaggctttctctttatatatcatagaatgtaataatgatgttgagtttgaggggatggagagtcgaaaaacacaattttagttgtcttaaaggtatcatttaaaacttagtatgttgcttccttttacagcattcgaactgttgtaaagatttaattcaaaagagaaaataatgtccatcctgtcgtgatgtgataggagcagcttaacaggcagggagaagcgcctccaacctcacagcctcgtagagcttcacagctactccagaaaatagggttatgtgtgtcattcatgaatctctataatcaaggacaaggataattcagtcatgaacctgttttctggatgctcctccacataaataattgctagtttattaaggaatattttaacataataaaagtaatttctacatttgtgtggaaattgtcttgttttatgctgtcatcattgtcacggtttgtctgcccattatcttcattctgcaagggaaagggaaaggaagcagggcagtggtgggtgtctgaaacctcagaaacataacgttgaacttttaagggtctcagtccccgttgattaaagaacagatcctagccatcagtgacaaagttaatcaggacccaagtctgcttctgtgatattatctttaagggaggtactgtgccttgttcatacctgtaccccaaattcctaggatggcatctgccttcagggggcactaaaatgtattattgaaacagcattctgggcttaaataggtgtatgtatgtgttggttgtgactgtactatttctagtatagtgaactacatactgaatatccaagttctcagcacctacttttgtcaaatcttaacattttgccacttcgagatcacattgccattcctcccctccaagaggtaacaattatccacaatttgatgtttatcattcctgtgttgttgtactttcactgtgtataacctaaaccatctactctttagtactgttttatatatttttaagcctcatacttgctcattctacagcttttttcactcattattgtataattatatctgaagctctcgttcattaattttagtcctgtgtagcagaattcaattacgggaactaccataatttatctgttctccagtccagttgaaggcatgaagttgttgccagtttctgtattataacactgtagtggaacattcttctgcattgggctcactgcgtgttacctaagacgtatcacagaataaacacatttagccttatagacattgccaaattgctcttcaaagtaaatgtgagtttttgtgaattacatgagtatggaatggtgttttattatgactttagtttgcattttcctcaa

SEQ ID NO: 399 - DNA, 1423 bp, Homo sapiens
ctccgctatcaacaacttattaaagaaaacttgaaagaaattgccaagttaatcacattggaacaagggaagaccctagctgatgctgaaggagatgtatttcgaggccttcaggtggttgagcatgcctgtagtgtgacatccctcatgatgggagagaccatgccatccatcaccaaagacatggacctttattcctaccgtctgcctctgggagtgtgtgcaggcattgctccattcaattttcctgccatgatccccctttggatgtttcccatggccatggtgtgtggaaataccttcctaatgaaaccatctgagcgagtccctggagcaactatgcttcttgctaagttgctccaggattctggtgcccctgatggaacattaaacatcatccatggacagcatgaagctgtaaattttatttgcgatcatccggacatcaaagcaatcagctttgtgggatccaacaaggcaggagagtatatcttcgagagaggatcaagacatggcaagagggttcaagccaatatgggagccaagaaccatggggtagtcatgccagatgccaataaggaaaataccctgaaccagctggttggggcagcatttggagctgctggtcagcgctgcatggctctttcaacagcagtccttgtgggagaagccaagaagtggctgccagagctggtggagcatgccaaaaacctgagagtcaatgcaggagatcagcctggagctgatcttggccctctgatcactccccaggccaaagagcgagtctgtaatctgattgatagtggaacaaaggagggagcttccatccttcttgatggacgaaaaattaaagtgaaaggctatgaaaatggcaactttgttggaccaaccatcatctcgaatgtcaagccaaatatgacctgttacaaagaggagatttttggtccagttcttgtggttctggagacagaaacattggatgaagccatccagattgtaaataacaacccatatggaaatggaactgccatcttcaccaccaatggagccactgctcggaaatatgcccacttggtggatgttggacaggtgggagtgaatgtccccattccagtgcctttgccaatgttctcattcaccggctctcgatcctccttcaggggagacaccaatttctatggcaaacagggcatccaattctacactcagttaaagaccattacttctcagtggaaagaagaagatgctactctttcctcacctgctgttgtcatgcctaccatgggccgttagaaacaagtttgtttaagactgactccatcctgagtaatctccctttatttttgaccagcttcatttgtcagctttgctcagatcagatcgatgggattggaatacattgtaactaaaatcttaaaaaaaa

SEQ ID NO: 400 - DNA, 1435 bp, Homo sapiens
ttgtaacagaaaattaaaatatactccactcaagggaattctgtactttgcccttttggtaaagtctcatttacatttctaaacctttcttaagaaaatcgaatttcctttgatctctcttctgaattgcagaaatcagataaaaactacttggtgaaatgacttcttgtcacattgctgaagaacatatacaaaaggttgctatctttggaggaacccatgggaatgagctaaccggagtatttctggttaagcattggctagagaatggcgctgagattcagagaacagggctggaggtaaaaccatttattactaaccccagagcagtgaagaagtgtaccagatatattgactgtgacctgaatcgcatttttgaccttgaaaatcttggcaaaaaaatgtcagaagatttgccatatgaagtgagaagggctcaagaaataaatcatttatttggtccaaaagacagtgaagattcctatgacattatttttgaccttcacaacaccacctctaacatggggtgcactcttattcttgaggattccaggaataactttttaattcagatgtttcattacattaagacttctctggctccactaccctgctacgtttatctgattgagcatccttccctcaaatatgcgaccactcgttccatagccaagtatcctgtgggtatagaagttggtcctcagcctcaaggggttctgagagctgatatcttggatcaaatgagaaaaatgattaaacatgctcttgattttatacatcatttcaatgaaggaaaagaatttcctccctgcgccattgaggtctataaaattatagagaaagttgattacccccgggatgaaaatggagaaattgctgctatcatccatcctaatctgcaggatcaagactggaaaccactgcatcctggggatcccatgtttttaactcttgatgggaagacgatcccactgggcggagactgtaccgtgtaccccgtgtttgtgaatgaggccgcatattacgaaaagaaagaagcttttgcaaagacaactaaactaacgctcaatgcaaaaagtattcgctgctgtttacattagaaatcacttccagcttacatcttacacggtgtcttacaaattctgctagtctgtaagctccttaagagtagggttgtgccttattcaactgcatacatagctcctagcacagtgccttattcggtaggcatctaagcaaatttcttaaattaattaatatatctttaaagatatcatattttatgtatgtagcttattcaaagaagtgtttcctatttctatatagtttattatacatgatacttgggtagctcaacattcttaataaacagcctttgtattcagaatataaaattgaaatagatatatataaagttaaaaaaaaaaaaaaaaaa

SEQ ID NO: 401 - DNA, 1791 bp, Homo sapiens
gccggtaggggacgcgccggcacagcaaaaatggcggcggcattacgggtggcggcggtcggggcaaggctcagcgttctggcgagcggtctccgcgccgcggtccgcagcctttgcagccaggccacctctgttaacgaacgcatcgaaaacaagcgccggaccgcgctgctgggagggggccaacgccgtattgacgcgcacgacaagcgaggaaagctaacagccagggagaggatcagtctcttgctggaccctggcagctttgttgagagcgacatgtttgtggaacacagatgtgcagattttggaatggctgctgataagaataagtttcctggagacagcgtggtcactggacgaggccgaatcaatggaagattggtttatgtcttcagtcaggattttacagtttttggaggcagtctgtcaggagcacatgcccaaaagatctgcaaaatcatggaccaggccataacggtgggggctccagtgattgggctgaatgactctgggggagcacggatccaagaaggagtggagtctttggctggctatgcagacatctttctgaggaatgttacggcatccggagtcatccctcagatttctctgatcatgggcccatgtgctggtggggccgtctactccccagccctaacagacttcacgttcatggtaaaggacacctcctacctgttcatcactggccctgatgttgtgaagtctgtcaccaatgaggatgttacccaggaggagctcggtggtgccaagacccacaccaccatgtcaggtgtggcccacagagcttttgaaaatgatgttgatgccttgtgtaatctccgggatttcttcaactacctgcccctgagcagtcaggacccggctcccgtccgtgagtgccacgatcccagtgaccgtctggttcctgagcttgacacaattgtccctttggaatcaaccaaagcctacaacatggtggacatcatacactctgttgttgatgagcgtgaattttttgagatcatgcccaattatgccaagaacatcattgttggttttgcaagaatgaatgggaggactgttggaattgttggcaaccaacctaaggtggcctcaggatgcttggatattaattcatctgtgaaaggggctcgttttgtcagattctgtgatgcattcaatattccactcatcacttttgttgatgtccctggctttctacctggcacagcacaggaatacgggggcatcatccggcatggtgccaagcttctctacgcatttgctgaggcaactgtacccaaagtcacagtcatcaccaggaaggcctatggaggtgcctatgatgtcatgagctctaagcacctttgtggtgataccaactatgcctggcccaccgcagagattgcagtcatgggagcaaagggcgctgtggagatcatcttcaaagggcatgagaatgtggaagctgctcaggcagagtacatcgagaagtttgccaaccctttccctgcagcagtgcgagggtttgtggatgacatcatccaaccttcttccacacgtgcccgaatctgctgtgacctggatgtcttggccagcaagaaggtacaacgtccttggagaaaacatgcaaatattccattgtaaacaaatcaaaggaaaagaaaccaagaactgaattactgtctgcccattcacatcccattcctgccttttgcaatcatcaaacctgggaatccaaatagttggataacttagaataactaagtttattaaattctagaaaga

SEQ ID NO: 402 - DNA, 1809 bp, Homo sapiens
cctgctccaaggtccagagagctttctggtctttgcagcaggcctgccgccttcatgtccactctcctcatcaatcagccccagtatgcgtggctgaaagagctggggctccgcgaggaaaacgagggcgtgtataatggaagctggggaggccggggagaggttattacgacctattgccccgctaacaacgagccaatagcaagagtccgacaggccagtgtggcagactatgaagaaactgtaaagaaagcaagagaagcatggaaaatctgggcagatattcctgctccaaaacgaggagaaatagtaagacagattggcgatgccttgcgggagaagatccaagtactaggaagcttggtgtctttggagatggggaaaatcttagtggaaggtgtgggtgaagttcaggagtatgtggatatctgtgactatgctgttggtttatcaaggatgattggaggacctatcttgccttctgaaagatctggccatgcactgattgagcagtggaatcccgtaggcctggttggaatcatcacggcattcaatttccctgtggcagtgtatggttggaacaacgccatcgccatgatctgtggaaatgtctgcctctggaaaggagctccaaccacttccctcattagtgtggctgtcacaaagataatagccaaggttctggaggacaacaagctgcctggtgcaatttgttccttgacttgtggtggagcagatattggcacagcaatggccaaagatgaacgagtgaacctgctgtccttcactgggagcactcaggtgggaaaacaggtgggcctgatggtgcaggagaggtttgggagaagtctgttggaacttggaggaaacaatgccattattgcctttgaagatgcagacctcagcttagttgttccatcagctctcttcgctgctgtgggaacagctggccagaggtgtaccactgcgaggcgactgtttatacatgaaagcatccatgatgaggttgtaaacagacttaaaaaggcctatgcacagatccgagttgggaacccatgggaccctaatgttctctatgggccactccacaccaagcaggcagtgagcatgtttcttggagcagtggaagaagcaaagaaagaaggtggcacagtggtctatgggggcaaggttatggatcgccctggaaattatgtagaaccgacaattgtgacaggtcttggccacgatgcgtccattgcacacacagagactttcgctccgattctctatgtctttaaattcaagaatgaagaagaggtctttgcatggaataatgaagtaaaacagggactttcaagtagcatctttaccaaagatctgggcagaatctttcgctggcttggacctaaaggatcagactgtggcattgtaaatgtcaacattccaacaagtggggctgagattggaggtgcctttggaggagaaaagcacactggtggtggcagggagtctggcagtgatgcctggaaacagtacatgagaaggtctacttgtactatcaactacagtaaagaccttcctctggcccaaggaatcaagtttcagtaaaggtgttttagatgaacatcccttaatttgaggtgttccagcagctgtttttggagaagacaaagaagattaaagttttccctgaataaatgcattattatgactgtgacagtgactaatccccctatgaccccaaagccctgattaaatcaagagattccttttttaaaaatcaaaataaaattgttacaacatagccatagttactaaaaaaaaaaa

SEQ ID NO: 403 - DNA, 2517 bp, Homo sapiens
ttcctccaggagtctctggtgcagctggggtggaatctggccaggccctgcttaggcccccatcctggggtcaggaaatttggaggataaggcccttcagccccaaggtcagcagggacgagcgggcagactggcgggtgtacaggagggctgggttgacctgtccttggtcactgaggccattggatcttcctccagtggctgccaggatttctggtggaagagacaggaaggcctcccccccttggtcgggtcagcctgggggctgagggcctggctgtcagccactcttcccagaacatatgtcatggcctcagtggctcatggggaagcaggggtgggcgagcttaggctagagcaagtcctgtgggagatggcagaggcctggtctgagaggcaactcggatgtgccctccagtggccatgctcccctccatgcgtctcccctgccctcctggagccctgcaggtcaatgtttaacagaaaccagagcagcggtggattaatgcgcaagggctcagccccccagccctgagcagtgggggaatcggagactttgcaacctgttctcagctctgcctcccctggccaggttgtcctcgaccagtcccgtgccatggcagcccacctgcttcccatctgcgccctcttcctgaccttactcgatatggcccaaggctttaggggccccttgctacccaaccggcccttcaccaccgtctggaatgcaaacacccagtggtgcctggagaggcacggtgtggacgtggatgtcagtgtcttcgatgtggtagccaacccagggcagaccttccgcggccctgacatgacaattttctatagctcccagctgggcacctacccctactacacgcccactggggagcctgtgtttggtggtctgccccagaatgccagcctgattgcccacctggcccgcacattccaggacatcctggctgccatacctgctcctgacttctcagggctggcagtcatcgactgggaggcatggcgcccacgctgggccttcaactgggacaccaaggacatttaccggcagcgctcacgggcactggtacaggcacagcaccctgattggccagctcctcaggtggaggcagtagcccaggaccagttccagggagctgcacgggcctggatggcaggcaccctccagctggggcgggcactgcgtcctcgcggcctctggggcttctatggcttccctgactgctacaactatgactttctaagccccaactacaccggccagtgcccatcaggcatccgtgcccaaaatgaccagctagggtggctgtggggccagagccgtgccctctatcccagcatctacatgcccgcagtgctggagggcacagggaagtcacagatgtatgtgcaacaccgtgtggccgaggcattccgtgtggctgtggctgctggtgaccccaatctgccggtgctgccctatgtccagatcttctatgacacgacaaaccactttctgcccctggatgagctggagcacagcctgggggagagtgcggcccagggggcagctggagtggtgctctgggtgagctgggaaaatacaagaaccaaggaatcatgtcaggccatcaaggagtatatggacactacactggggcccttcatcctgaacgtgaccagtggggcccttctctgcagtcaagccctgtgctccggccatggccgctgtgtccgccgcaccagccaccccaaagccctcctcctccttaaccctgccagtttctccatccagctcacgcctggtggtgggcccctgagcctgcggggtgccctctcacttgaagatcaggcacagatggctgtggagttcaaatgtcgatgctaccctggctggcaggcaccgtggtgtgagcggaagagcatgtggtgattggccacacactgagttgcacatattgagaacctaatgcactctgggtctggccagggcttcctcaaatacatgcacagtcatacaagtcatggtcacagtaaagagtacactcagccactgtcacaggcatattccctgcacacacatgcatacttacagactggaatagtggcataaggagttagaaccacagcagacaccattcattccatgtccatatgcatctacttggcaaggtcatagacaattcctccagagacactgagccagtctttgaactgcagcaatcacaaaggctgacattcactgagtgcctactctttgccaatccccgtgctaagcgttttatgtggacttattcattcctcacaatgaggctatgaggaaactgagtcactcacattgagagtaagcacgttgcccaaggttgcacagcaagaaaagggagaagttgagattcaaacccaggctgtctagctccgggggtacagcccttgcactcctactgagtttgtggtaaccagccctgcacgacccctgaatctgctgagaggcaccagtccagcaaataaagcagtcatgatttactt

SEQ ID NO: 404 - DNA, 3945 bp, Homo sapiens
cgtccacccgcccagggagagtcagacctgggggggcgagggccccccaaactcagttcggatcctacccgagtgaggcggcgccatggagctccgggtgctgctctgctgggcttcgttggccgcagctttggaagagaccctgctgaacacaaaattggaaactgctgatctgaagtgggtgacattccctcaggtggacgggcagtgggaggaactgagcggcctggatgaggaacagcacagcgtgcgcacctacgaagtgtgtgaagtgcagcgtgccccgggccaggcccactggcttcgcacaggttgggtcccacggcggggcgccgtccacgtgtacgccacgctgcgcttcaccatgctcgagtgcctgtccctgcctcgggctgggcgctcctgcaaggagaccttcaccgtcttctactatgagagcgatgcggacacggccacggccctcacgccagcctggatggagaacccctacatcaaggtggacacggtggccgcggagcatctcacccggaagcgccctggggccgaggccaccgggaaggtgaatgtcaagacgctgcgtctgggaccgctcagcaaggctggcttctacctggccttccaggaccagggtgcctgcatggccctgctatccctgcacctcttctacaaaaagtgcgcccagctgactgtgaacctgactcgattcccggagactgtgcctcgggagctggttgtgcccgtggccggtagctgcgtggtggatgccgtccccgcccctggccccagccccagcctctactgccgtgaggatggccagtgggccgaacagccggtcacgggctgcagctgtgctccggggttcgaggcagctgaggggaacaccaagtgccgagcctgtgcccagggcaccttcaagcccctgtcaggagaagggtcctgccagccatgcccagccaatagccactctaacaccattggatctgccgtctgccagtgccgcgtcggggacttccgggcacgcacagacccccggggtgcaccctgcaccacccctccttcggctccgcggagcgtggtttcccgcctgaacggctcctccctgcacctggaatggagtgcccccctggagtctggtggccgagaggacctcacctacgccctccgctgccgggagtgccgacccggaggctcctgtgcgccctgcgggggagacctgacttttgaccccggcccccgggacctggtggagccctgggtggtggttcgagggctacgtccggacttcacctatacctttgaggtcactgcattgaacggggtatcctccttagccacggggcccgtcccatttgagcctgtcaatgtcaccactgaccgagaggtacctcctgcagtgtctgacatccgggtgacgcggtcctcacccagcagcttgagcctggcctgggctgttccccgggcacccagtggggcgtggctggactacgaggtcaaataccatgagaagggcgccgagggtcccagcagcgtgcggttcctgaagacgtcagaaaaccgggcagagctgcgggggctgaagcggggagccagctacctggtgcaggtacgggcgcgctctgaggccggctacgggcccttcggccaggaacatcacagccagacccaactggatgagagcgagggctggcgggagcagctggccctgattgcgggcacggcagtcgtgggtgtggtcctggtcctggtggtcattgtggtcgcagttctctgcctcaggaagcagagcaatgggagagaagcagaatattcggacaaacacggacagtatctcatcggacatggtactaaggtctacatcgaccccttcacttatgaagaccctaatgaggctgtgagggaatttgcaaaagagatcgatgtctcctacgtcaagattgaagaggtgattggtgcaggtgagtttggcgaggtgtgccgggggcggctcaaggccccagggaagaaggagagctgtgtggcaatcaagaccctgaagggtggctacacggagcggcagcggcgtgagtttctgagcgaggcctccatcatgggccagttcgagcaccccaatatcatccgcctggagggcgtggtcaccaacagcatgcccgtcatgattctcacagagttcatggagaacggcgccctggactccttcctgcggctaaacgacggacagttcacagtcatccagctcgtgggcatgctgcggggcatcgcctcgggcatgcggtaccttgccgagatgagctacgtccaccgagacctggctgctcgcaacatcctagtcaacagcaacctcgtctgcaaagtgtctgactttggcctttcccgattcctggaggagaactcttccgatcccacctacacgagctccctgggaggaaagattcccatccgatggactgccccggaggccattgccttccggaagttcacttccgccagtgatgcctggagttacgggattgtgatgtgggaggtgatgtcatttggggagaggccgtactgggacatgagcaatcaggacgtgatcaatgccattgaacaggactaccggctgcccccgcccccagactgtcccacctccctccaccagctcatgctggactgttggcagaaagaccggaatgcccggccccgcttcccccaggtggtcagcgccctggacaagatgatccggaaccccgccagcctcaaaatcgtggcccgggagaatggcggggcctcacaccctctcctggaccagcggcagcctcactactcagcttttggctctgtgggcgagtggcttcgggccatcaaaatgggaagatacgaagcccgtttcgcagccgctggctttggctccttcgagctggtcagccagatctctgctgaggacctgctccgaatcggagtcactctggcgggacaccagaagaaaatcttggccagtgtccagcacatgaagtcccaggccaagccgggaaccccgggtgggacaggaggaccggccccgcagtactgacctgcaggaactccccaccccagggacaccgcctccccattttccggggcagcgtggggactcacagaggcccccagccctgtgccccgctggattgcactttgagcccgtggggtgaggagttggcaatttggagagacaggatttgggggttctgccataataggaggggaaaatcaccccccagccacctcggggaactccagaccaagggtgagggcgcctttccctcaggactgggtgtgaccagaggaaaaggaagtgcccaacatctcccagcctccccaggtgcccccctcaccttgatgggtgcgttcccgcagaccaaagagagtgtgactcccttgccagctccagagtgggggggctgtcccagggggcaagaaggggtgtcagggcccagtgacaaaatcattggggtttgtagtcccaacttgctgctgtcaccaccaaactcaatcatttttttcccttgtaaatgcccctcccccagctgctgccttcatattgaaggtttttgagttttgtttttggtcttaatttttctccccgttccctttttgtttcttcgttttgtttttctaccgtccttgtcataactttgtgttggagggaacctgtttcactatggcctcctttgcccaagttgaaacaggggcccatcatcatgtctgtttccagaacagtgccttggtcatcccacatccccggaccccgcctgggacccccaagatgtgtcctatgaaggggtgtggggtgaggtagtgaaaagggcggtagttggtggtggaacccagaaacggacgccggtgcttggaggggttcttaaattatatttaaaaaagtaactttttgtataaataaaagaaaatgggacgtgtcccagctccaggggt

SEQ ID NO: 405 - DNA, 14770 bp, Homo sapiens; identical to SEQ ID NO: 124

SEQ ID NO: 406 - DNA, 2381 bp, Homo sapiens
gaattcggcacgaggcgggctcaacttcgcagacctcatggctaggcaggggctgtacgaccgtctcccgcctctgcctgtcactccgggcatggagggcgcgggtgttgtgatcgcagtgggcgagggagtcagcgaccgcaaggcaggagaccgggtgatggtgttgaaccggtcagggatgtggcaggaagaggtgactgtgccctcggtccagaccttcctgattcctgaggccatgacctttgaggaagctgctgccttgctcgtcaattacattacagcctacatggtcctctttgacttcggcaacctacagcctggccacagcgtcttggtacacatggctgcagggggtgtgggtatggctgccgtgcacgtgtgccgtacagtggagaatgtgacagtgttcggaacggcctcggccagcaagcacgaggcactgaaggagaatggggtcacacatcccatcgactatcacacgactgactacgtggatgagatcaagaagatttcccctaaaggagtggacattgtcatggaccctctgggtgggtcagatactgccaagggctacaacctcctgaaacccatgggcaaagtcgtcacctatggaatggccaacctgctgacgggccccaaacggaacctgatggccctggcccggacatggtggaatcagttcagcgtgacagctctgcagctgctgcaggccaaccgggctgtgtgtggcttccacctgggctacctggatggtgaggtggagctggtcagtggtgtggtggcccgcctcctggctctgtacaaccagggccacatcaagccccacattgactcagtctggcccttcgagaaggtggctgatgccatgaaacagatgcaggagaagaagaatgtgggcaaggtcctcctggttccagggccagagaaggagagctagggcaagtggctgtgagaccctagagaccagcgaagggagaagttgggaagctacgttctgttggccaccagacttgcatttcagcctctgtcataatgctctgccctccctcccccgaaggtctctgtggtgatgaccgctcttccctgcccctccccgcttcctgacctctgaagaggttgggaagtgaccatttggatgtctgggccctgccaaggcgacagggagggtcagagggaggccggctgcttcctgcccccaccctttccccgggcctgctgtgctgcttttgtgccaaggttagccagtcccccctgttgtgttccatgtgctttcacctctgcctcatctttcctcccgtccctgccccgccacctccccaaagaattgaagacgtcagctcaggatatggggccatctctgtgagtcagcatgtacctgtctctcctagtgtccttcagcctgggctgaccagtgccgcctctgggcttgaccagttccaatctgtctgtccaacttcttaagcacaattgggcttcttcatctccaggttttctgccattcttaaccaaggctgcctcttccaacagggcgggaatcagacctactcccctaggtcacaactctgggaaggatacagagcccccacccttcactgagttctctggatttgttctcagtgccttagcaacgaaaacctgtgcttgtgtgtgtgtggcggcggggagggaggatcctgtttcccacctccttctcctcccctgtactccccagtgccttccttgttctggtggagctggggtttctctcctccccagtccacaacactgccaaaatctgtgtatgtggccattgggtggggcagccccaagcctcctggggaggcagggcaaaaacaggtgccctcatcgtggtctgtgccatgtcccgtctctatggtggttgaggagaaaggcggggaagcttcctcagccttgcagatatgtgtggcatttactagccagagctccgaaaggcagtgctgtctgtttcttgtactgggaccaaagtaaaaatccaagcacatccccttgcacttaggggaggccctactgcctctctcaaagcagagaggcagcttatcaaacctcagcccaaaactctgtttacatgggtggggagatggagcagggaactacagagtgggatggtcaggacctgggccattgcaaccaaaatggggacttcctgggtagggaggtcactccctctactcactagctaggattagggagggttattgccccaccattgcaatgggaggtggagggacaggctcagcctcctcattgtctaaatgaggcctaaatgtgtgaagtgcgatttctgcttttgtgtaccccaccaccccattaccacagctgcctttgtgtgtttgggtcaataaaaagccaaaccctga

SEQ ID NO: 407 - DNA, 7720 bp, Homo sapiens; identical to SEQ ID NO: 125

SEQ ID NO: 408 - DNA, 1717 bp, Homo sapiens
gtggattcttgtccatagtgcatctgctttaagaattaacgaaagcagtgtcaagacagtaaggattcaaaccatttgccaaaaatgagtctaagtgcatttactctcttcctggcattgattggtggtaccagtggccagtactatgattatgattttcccctatcaatttatgggcaatcatcaccaaactgtgcaccagaatgtaactgccctgaaagctacccaagtgccatgtactgtgatgagctgaaattgaaaagtgtaccaatggtgcctcctggaatcaagtatctttaccttaggaataaccagattgaccatattgatgaaaaggcctttgagaatgtaactgatctgcagtggctcattctagatcacaaccttctagaaaactccaagataaaagggagagttttctctaaattgaaacaactgaagaagctgcatataaaccacaacaacctgacagagtctgtgggcccacttcccaaatctctggaggatctgcagcttactcataacaagatcacaaagctgggctcttttgaaggattggtaaacctgaccttcatccatctccagcacaatcggctgaaagaggatgctgtttcagctgcttttaaaggtcttaaatcactcgaataccttgacttgagcttcaatcagatagccagactgccttctggtctccctgtctctcttctaactctctacttagacaacaataagatcagcaacatccctgatgagtatttcaagcgttttaatgcattgcagtatctgcgtttatctcacaacgaactggctgatagtggaatacctggaaattctttcaatgtgtcatccctggttgagctggatctgtcctataacaagcttaaaaacataccaactgtcaatgaaaaccttgaaaactattacctggaggtcaatcaacttgagaagtttgacataaagagcttctgcaagatcctggggccattatcctactccaagatcaagcatttgcgtttggatggcaatcgcatctcagaaaccagtcttccaccggatatgtatgaatgtctacgtgttgctaacgaagtcactcttaattaatatctgtatcctggaacaatattttatggttatgtttttctgtgtgtcagttttcatagtatccatattttattactgtttattacttccatgaattttaaaatctgagggaaatgttttgtaaacatttattttttttaaagaaaagatgaaaggcaggcctatttcatcacaagaacacacacatatacacgaatagacatcaaactcaatgctttatttgtaaatttagtgtttttttatttctactgtcaaatgatgtgcaaaaccttttactggttgcatggaaatcagccaagttttataatccttaaatcttaatgttcctcaaagcttggattaaatacatatggatgttactctcttgcaccaaattatcttgatacattcaaatttgtctggtaaaaaaataggtggtagatattgaggccaagaatattgcaaaatacatgaagcttcatgcacttaaagaagtatttttagaataagaatttgcatacttacctagtgaaacttttctagaattatttttcactctaagtcatgtatgtttctctttgattatttgcatgttatgtttaataagctactagcaaaataaaacatagcaaatggc

SEQ ID NO: 409 - DNA, 3134 bp, Homo sapiens
tccagcgaacagccccgcttctaacccgagatgctgctgccggcgcccgcgctccgccgcgccctgctgtcccgcccctggaccggggccggcctgcggtggaagcacacctcctccctgaaggtggccaacgagcccgtcttagccttcacgcagggcagccctgagcgagatgccctgcaaaaggccttgaaggacctgaagggccggatggaagccatcccatgcgtgatgggggatgaggaggtgtggacgtcggacgtgcagtaccaagtgtcgccttttaaccatggacataaggtggccaagttctgttatgcagacaagagcctgctcaacaaagccattgaggctgccctggctgcccggaaagagtgggacctgaagcctattgcagaccgggcccagatcttcctgaaggcggcagacatgctgagtgggccgcgcagggctgagatcctcgccaagaccatggtgggacagggtaagaccgtgatccaagcggagattgacgctgcagcggaactcatcgacttcttccggttcaatgccaagtatgcggtggagctggaggggcagcagcccatcagcgtgcccccgagcaccaacagcacggtgtaccggggtctggagggcttcgtggcggccatctcgccctttaacttcactgcaatcggcggcaacctggcgggggcaccggccctgatgggcaacgtggtcctatggaagcccagtgacactgccatgctggccagctatgctgtctaccgcatccttcgggaggctggcctgccccccaacatcatccagtttgtgccagctgatgggcccctatttggggacactgtcaccagctcagagcacctctgtggcatcaacttcacaggcagtgtgcccaccttcaaacacctgtggaagcaggtggcccagaacctggaccggttccacaccttcccacgcctggctggagagtgcggcggaaagaacttccacttcgtgcaccgctcggccgacgtggagagcgtggtgagcgggaccctccgctcagccttcgagtacggtggccagaagtgttccgcctgctcgcgtctctacgtgccgcactcgctgtggccgcagatcaaagggcggctgctggaggagcacagtcggatcaaagtgggcgaccctgcagaggattttgggaccttcttctctgcagtgattgatgccaagtcctttgcccgtatcaagaagtggctggagcacgcgcgctcctcgcccagcctcaccatcctggctgggggcaagtgtgatgactccgtgggctactttgtggagccctgcatcgtggagagcaaggaccctcaggagcccatcatgaaggaggagatcttcgggcctgtactgtctgtgtacgtctacccggacgacaagtacaaggagacgctgcagctggttgacagcaccaccagctatggcctcacgggggcagtgttctcccaggataaggacgtcgtgcaggaggccacaaaggtgctgaggaatgctgccggcaacttctacatcaacgacaagtccactggctcgatagtgggccagcagccctttgggggggcccgagcctctggaaccaatgacaagccagggggcccacactacatcctgcgctggacgtcgccgcaggtcatcaaggagacacataagcccctgggggactggagctacgcgtacatgcagtgagcccctctcgggctccaccgtccagctgtctgtccgtccaggtggccgacctcactgcacagaccccactccagcccctccaccccttcttcatgcacagctgcctttctataatccgggcttgactcccttcttaccactgtattctggcctctcccatgcctcaggctctggtttgagatcgtgctggggaggaacatggccactaccccttatcccatcggccatgtgggaggtatgaccctggtgcctggcaggttctccctctgccctccactgggcccagtggctcagggacctggggaaaggagatggagcagctcttgggatcctttggggaaaaggaggccattctgggccccttggcaaacctcaccactcacagaggctcctggccttgatccctgcccctccaggtgtccagggtaaagtgtaactcagactgacctgtggggcacagggggcaccagctggccttgccctctctggtctgggctgtctaccttcctcactgtatctttgcccagacccacctgggccagtaggcctgtccccagccacacaccttagatgctggcatgccttactccaggtgcctgtgtttggccgaggcctgtgtgattcccggtctgcaccacatggcggggttggggggccgctggaggccacctgccaaggcgtgggatgggatggtcctgccggtttaggccgtgattctggaaaaccttggatgggccttcgtcctatgtcagccttccctttgatcctcaggccctacctgtagagacctccactcctagagccagtctcagggtctgggatttccctgcaggagctcagccaccactgtgccatggtgacacaggccaaggcagacattggccctcccttctcccagcccccagaggcctggccttgggttcgtcagcatgggccgaggacgttgcctgtagaatcctcctctgcctgggagtggctctgtgtggaccagtccctcactggcccattctttttttgacgcagccaatctgtgaccacgattcctcccacagatgcctcctgcttggattctgagtggtcagagatctgtaaagcatgactttcaaggatggttcttaggggactgtgtaaagtgttgggtcttcctccaggatgcctgcatgggaccccacccggagctggtgtggccattccccgaagtgccactggcccatggatgggggtgggtgctggtgcacctgggctgggtgtgggttctgtgtccttccaggatctgtgtcatttcccatgaggggccggggcaggtggctgggtgggggcacaggctggagtattcttagttctactggttctacactgtgaggtggcaatgggatttgctcagatgccacccaataaaatgcctgttactt

SEQ ID NO: 410 - DNA, 2053 bp, Homo sapiens
ctttatctgaaacttgattgtcttaaatgtatttgtggagaaatataattattgtatattttgtgtaacagaatcagtgagaataagctggtcgcaaactgtcttgcctagagagagggcagtggcatacagctgcagaagcgcgacacgggcctgctgagtgttccgtttcatttcaaattaggtcattctgtcttgattttgatatggatgtttcagaagaccctagcagatgtccctgtttaacttgaaaccatagatcagaaaactaagttcatatttcaattttacagagatttgaatagaaaaagtaatcaagttaaaacctgcaaagctaaaattgaactacttgggagctatgatccacaaaaacaacttattattgaagatccctattatgtaagtacagttcacgttttagggctaatatgaagacccaacacatttgtatcctgccatattaaataacagatgagattgtgttaaggatgtttttgttatgcaggttttgccattttcttctttttcctgtccatttaggggaatgactctgactttgagacggtgtaccagcagtgtgtcaggtgctgcagagcgttcttggagaaggcccactgaggcaggttcgtgccctgctgcggccagcctgactagaccccaccctgaggtcctgcatttctcagtcggtgtgtaatcacgttccagggcccaaagccagctctttgttcagttgacttactgtttcttaccttaaaaagtaattgtagatggaaatcagttgtgtttggcaggagaatcaataaaaatgtttgattcagacagcttatggggtattttaagcattcttagactagttgaacatctcactttgccccagttacaaaaatagtagaacaagcaacataaaacaatgaaggaaaacctcacttgaaggcccaggtcaacatctaagcctgttgagacttagataatcgagtctacctcttcagtaggtttgtgtggatggcctggaggcaggtgcttgctccccagtgctacctctctcttccctagggccttttgtggattgacagtagtcccctccgtagagctcacagtctagattagaagtgttttaatttctacacacccatagtgcacacttgtatattgaaaagatagggaagagagaaacatttatggaatcagtcgttggcaccttcaatacttcatgatttttgtcgagtttacttcatgaggaggtcagcccattggctcccatctgaaccactttgcctctgaaacttaattacatccagaaagaaggacacttgtatgctagtctatggtcagttgaggaatatgactgtttttatatgcacatgtaacccaaatgtccaatataaattggcttattttttaaaataattttaaaagttgggaaaagtgttattatttggcatgcttaaatattgaataagtattcttcatcagcatttaataaatgtataggcagatgtaaggtaatttctgtgtattttgagataatgtcaaaatcatgaatatttcaaaataaactggggagttataaaaatacaactagagatataaatctgtgtctgtcctgttgttgattgacaggtaggaagcatttgcaaaacattgtattgtcctttttacatgatctgtgatgttaggcgtgcgtgccatattttagtcttcaggggataaggaagtaagacatgatgaaaagtcagcacgactgctgccccatgtcatcatgtctagtttctgaaggaagtttgaggttctacagctggaactgtccttgcccagtaccatcctctggacatgttgcctctacgctgtgccctcctgtgcagtgatcgactgcctggccaggacatctgcactcctgacctcagtatcatgagggtcccaggcagtgcatgggaggagacacgtttgatcctttgactccctagtatctttgaggataagcttgtttgcccagatgaaaagtgagtagtttcccactgtacccatgtggaagtgcccagggctgtcttcatag

SEQ ID NO: 411 - DNA, 2481 bp, Homo sapiens
gccgccgccgcagctgctcctggtccccgtccctttgccgccctcgtcaggcccagctctcctgcgccgccgcctcccgccgcgccccgccatgccgctctactccgttactgtaaaatggggaaaggagaaatttgaaggtgtagaattgaatacagatgaacctccaatggtattcaaggctcagctgtttgcgttgactggagtccagcctgccagacagaaagttatggtgaaaggaggaacgctaaaggatgatgattggggaaacatcaaaataaaaaacggaatgactctactaatgatggggtcagcagatgctcttccagaagaaccctcagccaaaactgtcttcgtagaagacatgacagaagaacagttagcatctgctatggagttaccatgtggattgacaaaccttggtaacacttgttacatgaatgccacagttcagtgtattcgttctgtgcctgaactcaaagatgcccttaaaaggtatgcaggtgccttgagagcttcaggggaaatggcttcagcgcagtatattactgcagcccttagagatttgtttgattccatggataaaacttcttccagtattccacctattattctactgcagtttttgcacatggctttcccacagtttgccgagaaaggtgaacaaggacagtatcttcaacaggatgctaatgaatgttggatacaaatgatgcgagtattgcaacagaaattggaagcaatagaggatgattctgttaaagagacagactcctcatctgcatcggcagcgacaccttctaaaaagaaaagtttaatcgatcagttcttcggtgttgagtttgaaactaccatgaaatgtacagaatctgaagaagaagaagtcaccaaaggaaaggaaaatcaacttcagcttagctgttttatcaatcaggaagtcaagtatctttttacaggacttaaattgcgacttcaggaagaaatcaccaaacagtctccaacgttgcaaagaaatgccttgtatatcaaatcttccaagatcagccggctgcctgcttacttgaccattcagatggttcgatttttttataaagagaaggaatctgtgaatgccaaagttcttaaggatgttaaatttcctcttatgttggatatgtatgaactgtgtacaccagaacttcaagagaaaatggtgtcttttcgatccaaattcaaggatctagaagataaaaaagtgaatcagcagccaaatacaagtgacaaaaagagtagtccccagaaagaagttaagtatgaacccttttcttttgctgatgatattggctccaataattgtggatactatgacttacaagcagtactaacacaccagggaaggtctagttcttcaggtcattatgtatcatgggtgaaaaggaaacaagatgaatggattaagtttgatgatgacaaagtcagcatcgtaacaccagaagatatcttacggctttctggtggtggagactggcatatcgcttacgttctactctatgggcctcgcagagttgaaataatggaagaggaaagtgaacagtaatcttcattttagtatttatgcttagatgtgaaaataaatgttatttgttgatcatttctataatccagagctttagaggaagacacataggtgggtttatgtttcacctcatttggaacaaaagaggacagaagcagaccactctgtgcaccaacctaaaaaattacagagaagagaaaattatctttggattgtgctgccctatataaaggtggcagaaagacatttttaaaaagcttattatttcttgcattattttaaaaagttcagagttgaaatgcctttcaaccatttccttctgtggtcatttttcttgctgcctttttcacccaagattcagcagtcagatgtttactgcacacctattacctattatttgctgttcttgcatggttcaaaccaccattctgtagccacccatcctttgccttatctaacaaacatttttccaggaaggtggaaaaggaagtgttgctctcattgtgtgactcagtgctgctgtccatcccatggaaacatgggcacaatcaagtatttgtccagcctattgcaggcttttcctgactttaaaataaattgtgatcaataatagtacctttgattatacatttattattgtgtctctctctgatgtactgtggattgtacatttaactttggaatggctttgtaataatcagtcttaagaaaatgttgacaagctctggttgcttatttttagaaaatgaggacatttaataataataaaaaaaaagggattaatagcttttgacctcaagtcttttgtcttctgagtgttggagcttggctgaagacatgtttaatactgtacaatttctgaagatggttattaacactgtgctgttaagcatccatttaaaaatatgttatcttctttgcctgcc

SEQ ID NO: 412 - DNA, 2253 bp, Homo sapiens
gtgcatgccgtgggtctgacggcttgagtagcgctagggagaatccctgcaggtaatatttgacttttgcttcatattaatctgagtggaaaataaaagggccctcttctcctctcgcttccctgccgggcaggcgccatggcggaagcctcggcgacgggcgcctgcggagaggcgatggcagcggcggaaggctcctcgggcccggcgggcttgactctgggccggagcttctcgaactaccggcccttcgagccccaggcgttgggcctcagcccgagctggcggctgacgggcttctccggcatgaagggctgaggctgcaaggtcccgcaggaggcgctgctcaaactcctggcgggactgacgcggccggacgtgcggcccccgctgggccggggcctggtgggtggccaggaagaggcgtcccaggaagccggcctgccggcaggagcgggccccagccccacctttccagccctgggcatcgggatggactcctgcgtcatccccctgaggcacgggggcctgtcactggtgcagaccacggacttcttttaccccttggtagaagatccctacatgatggggcgcatagcttgtgccaacgtgctgagtgacctctacgccatggggattactgagtgtgacaacatgttgatgttactcagcgtcagccagagtatgagtgaggaggaacgcgaaaaggtaacgccactcatggtcaaaggctttcgggatgcggctgaggaaggagggacggcagtgaccggtgggcaaacggtggtcaacccttggattataatcggtggagttgccactgtagtatgccaaccaaatgagttcataatgccggacagcgccgtcgttggggacgtgctggtgttaaccaaaccgttaggaacccaggttgctgtcaatgcccaccaatggctggataatcctgaaagatggaataaagtaaagatggtggtctccagagaagaggtggagctggcctatcaggaagccatgttcaatatggctaccctcaacagaactgctgcaggtttaatgcacacatttaatgcccatgcggccacagatatcacaggctttggcattctaggacactcccagaaccttgcaaaacaacaaagaaatgaagtgtcctttgttattcataatctgccaataattgccaagatggctgccgtcagcaaggccagtggacggtttgggcttcttcaaggaacctcagctgaaacctctgggggattactgatttgtctgccaagagaacaggcggctcgcttttgttctgaaatcaaatcctccaagtacggagagggtcaccaagcgtggatcgttggcattgtggaaaagggaaaccgaacggcccggatcattgacaagccgcgagttattgaagtcctgcctcgtggggccacagctgctgttcttgctcctgacagttcaaatgcctcctctgagcctagctcgtgagatgaaagaacagaagttgtttggaccttagagccattgtccacaatcacggatggttctcaagagttgattgtaagaaatttccaaagaaggctgcctgcatagtggttccggctgccctttctaggtgattggaatcagcccatctaaagcagtctttatatgcattccgaggccagagtaacattttgaactttggggggatatttgttcatcacttgggtagaagaggagcaaaaatacttctgttttctcttgccaaagtaagatgaagctattccaggttgagggatttttctttgcacggggttgattaatttctgcacagggagtgagattattaaagtaacacacacacaaagtaaattgcaaaatgaaaaaaattagaagcaaatgagttttggaccaatattgttgataaatctaaattgttaagagagatcttataatgcaacatcaaattctttattcaattttactgaagtactggctctttcctgctctggacaagaattgagcaacttgtctgatgactgggaaaggaggacctgcaaccatctgacttggtctctgttaatgacgtctctccctctaaaccccattaaggactgggagaggcagagcaagcctcagagcccaggcctcagtggtcattaagatgttaagtcttttgcggcagattcctggtgatttgatcaataaagagtaatttcttgctaaataaataaaagaaaccttgttgaaaaactaaaaaaaaaaaaaaaaaaa

SEQ ID NO: 413 - DNA, 233 bp, Homo sapiens
aacattaggaaaagaagtaaaaaaaaacttgtatggaattcctacgtagtcaattgtctaataggttttgtttatggtacttcagagttgctcaaactatgaaacctaaaatacaacacagtgacttttctcttgagttggcacatctaaatgaacaattcacaaatgtcattaaaaggtactgtttgagaaatacatatttaaaattaaaatgcatcaaaagatatgaaatc

SEQ ID NO: 414 - DNA, 3931 bp, Homo sapiens
gcccgggcgctctcagcaggatggccaacaccttccctctccatccatacaccccgccgccccctggcccgtggccgcgctcggttcccgcactgctcattccaccccctacatcccagcccgctgccagagccggggagagggcgggggccgcgtgggcgaggccgtgaacagcggctgtcacgtgggccgcccaggccaataggggtgaggctttgggtcgagctcagtcctcccccggcgcctccgactggcagtgggactcagcgggcgtggaggtcgcggctgagcgagcgagccctgggcgagtgaattgtggctgtgggttgacggtggagacaccccccggagggaggcggagggaagggaggcgaggcctcgacctgcatgcttcccgcctcccactccccagcgcccccggaccgtgcagttctctgcaggaccaggccatggagctcgaagtccggcgggtccgacaggcgttcctgtccggccggtcgcgacctctgcggtttcggctgcagcagctggaggccctgcggaggatggtgcaggagcgcgagaaggatatcctgacggccatcgccgccgacctgtgcaagagtgaattcaatgtgtacagtcaggaagtcattactgtccttggggaaattgattttatgcttgagaatcttcctgaatgggttactgctaaaccagttaagaagaacgtgctcaccatgctggatgaggcctatattcagccacagcctctgggagtggtgctgataatcggagcttggaattaccccttcgttctcaccattcagccactgataggagccatcgctgcaggaaatgctgtgattataaagccttctgaactgagtgaaaatacagccaagatcttggcaaagcttctccctcagtatttagaccaggatctctatattgttattaatggtggtgttgaggaaaccacggagctcctgaagcagcgatttgaccacattttctatacgggaaacactgcggttggcaaaattgtcatggaagctgctgccaagcatctgacccctgtgactcttgaactgggagggaaaagtccatgttatattgataaagattgtgacctggacattgtttgcagacgcataacctggggaaaatacatgaattgtggccaaacctgcattgcacccgactatattctctgtgaagcatccctccaaaatcaaattgtatggaagattaaggaaacagtgaaggaattttatggagaaaatataaaagagtctcctgattatgaaaggatcatcaatcttcgtcattttaagaggatactaagtttgcttgaaggacaaaagatagcttttggtggggagactgatgaggccacacgctacatagccccaacagtacttaccgatgttgatcctaaaaccaaggtgatgcaagaagaaatttttggaccaattcttccaatagtgcctgtgaaaaatgtagatgaggccataaatttcataaatgaacgtgaaaagcctctggctctttatgtattttcgcataaccataagctcatcaaacggatgattgatgagacatccagtggaggtgtcacaggcaatgacgtcattatgcacttcacgctcaactctttcccatttggaggagtgggttccagtgggatgggagcttatcacggaaaacatagttttgatactttttctcatcagcgtccctgtttattaaaaagtttaaagagagaaggtgctaacaaactcagatatcctcccaacagccagtcaaaggtggattggggaaaattttttctcttgaaacggttcaacaaagaaaaactcggtctcctgttgctcactttcctgggtattgtagccgctgtgcttgtcaaggcagaatattactgaagaatgatcctgttcaacctcctagtgcctctactgaattattcctcttttaaatggttaatgaaccaataatttttaaatcataccaaaaatagtaagaaaatatgcaaacactctgtgatcaaacttaaaagtcattgccattcatcattaataaaagttgccatttcaactacgtcccaacattccctaatagggtattcagggaacctgtcttaaattgtgcttatctaaatcttggaactttgagctaggggaggagaatgtattagactaaatacaaactgcggggttgtaagggagtctcagaacctcactgaatccttcactccagttaatggcactgctcacttcctgcctctgctgccaccatcactgtgtgaagctttcaagagcttggtacttcccagggctaccggcagtcctctgtagtccagagaggtgagattagatcttcttggttccctgtgaggtttcaggcactaaaactctatgtggggaagggaggggttactcctcctccaatgggactcaaggacttgacctccaggagtaggcccctggtcagaagtgccatctcaccagtggtcttcattcttcctcattcattctttatcatcctgtgttctgtttagttgcaacaatctcttgtgactaatgtcactcaaagcatcttgtaacctagggcttcctggaagttagttgccaaagtcatgcaagcatcacctgtcattcttgtgttggagttatagaattctacatcttataaaacctaactggcatttaaaaaatactgtggccgggcgtggtggctcatgcctgtaatcccagcactttgggaggccgaggtgggaggattgcttgagtccaggaatttgagaccagcctggacaacacagtgagacctcatctctatcaaaaaataaaaattagctagatgtggtggcatgagcctgtgttcccagctgcttaggaggctgaagcaggaggattgattgagcctgcgaggccaaggctgcagcaggctgtgattgcaccactgcacttcagcttgggcaacagagcaagaccctgtctccgaaacaaataaaaaatactgtaataaaagtacttataaacatactaatcctctttcaggaccctaaagttgcaggttagtaggtcttcaaggacaaatctgtaagtttcttttctgtagtgcaagtaaaatttcactttttgaaactatagagagatccctttctgattagcctacagaacttaaagtgagggaaccatttcctctcacagacaaagaggcctgggatattaggactttggggtttgagagcatcatggggcagacagatggtggatggtctggacaagaagcgagtaagccactgcggttggtcatactgaagggaattgatggcaagaggatcccctgagcaagtcagaagttactctcatcagtcgttcatggtcacaacctgaggtactctgctgagtgggcaaggctgaagtaagaggcctgtggaatgcagcattacctgctggacagagcagggcaggcagttctatgccttggagctcctgactgcagggactctgtccccacactcagaaagactcagctcactcaatgagagaatgtgatttactttatagaacgtataatcaactttgttgaataatttgttctattaaggctgtctaaaatgtgatgtcttcatcatagtatgaagtgttgaaaattaataacgagcctagtttaggaaaaagctgcttaaaactgtggctctaagagagtaatcataaaataccttagataaaattgcactatggaattttcattgagtatgtttaaattattggcttgtctactaatacatctgcttcaaaatgaacatatttcataaaattggcatcaattttaatgacgctcctggtatggaacctcagatataccctattggagacaatcctttgatcataaattctccccaactataaatcattttatgtctttaaaaaaaaaaaaa

SEQ ID NO: 415 - DNA, 662 bp, Homo sapiens; identical to SEQ ID NO: 126

SEQ ID NO: 416 - DNA, 2331 bp, Homo sapiens
  misc_feature (1)...(2331): n=a,t,g or c
cagtttcaagaggaaaagttaaataaattgcagaagttacttattcttttaagaggtctgcctggttytgggaaaacaacattgtctcggtaagtaaaggataccaactgaatacttggtaattcattatttaaaaattataaatgatatttgtcgccggctgcagtgactcatgcrtgtaatcccaacactttgggaggccagggtggaccagtcacttgagctcaggagtttgagaccagcctgggcaacatagtgagaccctgtctctaaaaaatgaaataaaaatgttagaactataatgatacttgtaatcactgacaagtgcttttatgtttctagtagaagaaaatctttaatttgctacacttgrgaatagcatctgacagtgtaactatttaaaaatcttttctgatagaagaaaggagaattggcatatgtttatatttagattctgctaagggctttaaaaatagataacaytacgtataattatggcagtgatgaaagcaaatgctacttgagaactgtcctggcctacccttttgagtcagctgttcaaggaaagttggactcagtgttagaaaatttgagtttttcaagttcagttggaggtgagaaaaagagaaaatttgggtattgactcagttatttccctttttcaccttgggcaagttttgctctctgttaatggaataaatgatacttactttttctggaattgggaatcaaatgagatgacccaaggaaaggaattttgaatgtgttgagcactgtgccatgttcataccattgattggcagaaggaacccttttttgatttcttaaaattcaggagtttgaagtgagtaatatctgaattggtgttagaactgttggyggtttattgtattacaagatatttcaaattcctttttttgtttacacttttaaactattgatgcacttgaatatgtttatgcagttgtgaaaaaatagygtaaagaaagcagtacaaattatcttgagtttatataagatgattcaagatttgtgccggacaaggagaaaaagaaaatttgttgatatctttgggtgaggatggagaggtccaagaaaccattttgcaaatgttttatattactaacaagacaatctaaacctaaataaacatctttttcagagaaaagacactagagaaagatttaatttgtgatamttcaagctagattatraactgtgatctttgtgaatgaattaattcattccagaattaaattttggtctttgtattttgattccttttactttagtgaggattttgtagagaagatgaaatttcacctctataataatagaagttaggagtgaggtctcacaaacatgggctgccttctagatttgggatataccatcagggacaataaataactgaaatttggaaactggataaargagtctgctagttaggaccacttgactaagagtgggtatagaagaaacctaaggaagaaaagttagatttgagacaacatattggagtatgttgaaattaaaggtgaataaagtagtggaaattcgatagaatttaaaggagacattgtagtgggagatggtagaggtgattagatataatatgtatatttatttgaaaaatagatatataagaatgaaagttgtatgtagtaccaacaagtaccattcgtattatgattcacaatttacagagtattttcatatataaaaatcttgtgcaatgggttgttttttcattttatagaaggagcagaggctaaaggaagttgaggttaagtgatttggaagtcacaaaaactagtaagagctcaaactagcaataaaattatagtatgtttttcccttgccttctctgtaatgcttaatggttgtgtagtcttatacgtgactcctgacttcaaggatcctggtctgtacctctttaggtcaacacgttttgagtgaactggtgttggttatttggaattagatataaagtcatatattctttggtgaggaatggcttcatataggagttcacaygcaaaacaagctttgccaaaataatagagtgaaaattggtagatcagagttgaggctgattggagggccaaactgaaagactggctgggcatgntggctcacacctgaaaacccagcactttgggagcccaaggcaggcagattgtttgagcccaggaattcaagaccagcctagataacctgggtatcccagctacttgggaggctgagctgccgaggctgcagtgacccatgatcgtgccatttctttctaacctgggtkacaggttnaaaccctttcccaaaaaaaaaaaa

SEQ ID NO: 417 - DNA, 2436 bp, Homo sapiens
cgaccacctgtctggacaccacaaagatgccacccgttgggggcaaaaaggccaagaagggcatcctagaacgtttaaatgctggagagattgtgattggagatggagggtttgtctttgcactggagaagaggggctacgtaaaggcaggaccctggactcctgaagctgctgtggagcacccagaagcagttcgccagcttcatcgagagttcctcagagctggctcaaacgtcatgcagaccttcaccttctatgcgagtgaagacaagctggagaacaggggcaactatgtcttagagaagatatctgggcaggaagtcaatgaagctgcttgcgacatcgcccgacaagtggctgatgaaggagatgctttggtagcaggaggagtgagtcagacaccttcataccttagctgcaagagtgaaactgaagtcaaaaaagtatttctgcaacagttagaggtctttatgaagaagaacgtggacttcttgattgcagagtattttgaacacgttgaagaagctgtgtgggcagttgaaaccttgatagcatccggtaaacctgtggcagcaaccatgtgcattggcccagaaggagatttgcatggcgtgccccccggcgagtgtgcagtgcgcctggtgaaagcaggagcatccatcattggtgtgaactgccactttgaccccaccattagtttaaaaacagtgaagctcatgaaggagggcttggaggctgcccaactgaaagctcacctgatgagccagcccttggcttaccacactcctgactgcaacaagcagggattcatcgatctcccagaattcccatttggactggaacccagagttgccaccagatgggatattcaaaaatacgccagagaggcctacaacctgggggtcaggtacattggcgggtgctgtggatttgagccctaccacatcagggcaattgcagaggagctggccccagaaaggggctttttgccaccagcttcagaaaaacatggcagctggggaagtggtttggacatgcacaccaaaccctgggttagagcaagggccaggaaggaatactgggagaatcttcggatagcctcaggccggccatacaacccttcaatgtcaaagccagatggctggggagtgaccaaaggaacagccgagctgatgcagcagaaagaagccacaactgagcagcagctgaaagagctctttgaaaaacaaaaattcaaatcacagtagcctcgatagaagctatttttgatgaatttctaggtgtttgggtcacagttcctacaaatacggaaaagggggttaaaaagcagtgctttcatgaatgccatcctacacatattattgctattacctgaacaaaatagaattacaaatagcacttgataattttaaagtatgttttagaaattttcttaggagcaaaataagtacaaagtaaatcttgaacaggttcactaagcacccaccctgtgaaaagtattatggaaatcactgcagcacaggaaaagtaattcagatgttaatgccacttgaagaagttggtaggctagcaaagaggatgagacatgaactgtcataaaggactcagcaaccagccagggacagataaagcgctatggaaaggggcttccaagttcttttgaacatgacccttagtaacaaacacaatttatataatgacccagcaaaacacatcacatcttactgtcgaaattaaatgtgtgatccatcctagtattttctgttccattccttttcattctatttcatttataaaacatgctagttgagacttttcaaatggatttttatgacccactactgggtttggatccacagtttgaaaaatattgctacaagacacttaaggagaccatcctgtttaagtttattcttataagtaggtcagtcatatgagacctgatcaataaatatccaatacccagagtcctgctctcagagttcttctgtttcgtgacccacttttctaccagtaaaagacatagaccaatggggaggaggggaggagagatggatatttcagccctctccatcctagtcaacactggatccacctagtgcctctgggccataaggctgagcagagtgagcttgtattagttggtagcttttaaaaaatataataaaaaaaaagtagagattctccaaactctagcctggtttcctagattgagaactatgatatttttctctgataatttaatatctactctcctacaaaagctcaagcctgaagatacaagactattagaagaaacatgactaccctcagtgtattagaaaagaggtcatgcagctttctaaacattattgaattgtttgagctgttttgaaattgtaattcttttcagctattaaaaagaagagcaatgagaaaaaaaaaaaaaaaaaaaaa

SEQ ID NO: 418 - DNA, 5767 bp, Homo sapiens
gagggaggagagttcacttttacttcagtgtcagcgcgcggcggccgtggctggctctggcgagagagcaccgagggagtgggtcgcagatcttcgggcggctaggggaaatcggcgagaggcgggatccgagcgcgccggcggggcgcagagcccgcgagcctggccagcgagggtagccgcggggggcgcgccccgggcgggcccccggagacgcgcaggatgccacacgaagagctgccgtcgctgcagagaccccgctatggctctattgtggacgatgaaaggctctctgcagaggagatggatgagaggaggcggcagaacattgcttatgaatatctgtgccacttagaggaagccaaaaggtggatggaagtttgcttagttgaagaattgccaccaaccactgaattggaagaagggctccggaatggagtttaccttgcaaagttagccaagttctttgccccgaaaatggtatcagagaaaaagatctatgatgtggaacaaacacgttataagaagtctggccttcattttcgacacacagataataccgtccagtggttaagagcgatggagtctattggtctacccaagatattttatccagaaacaacagatgtctatgatcggaaaaacataccaagaatgatatattgcattcacgcactgagtttgtatctgttcaaactaggaatagcaccccagatccaggatttgttgggcaaagtagacttcacagaggaggaaatcagtaatatgagaaaagaacttgagaaatatggaatacagatgccatctttcagcaaaataggtggtattctggccaatgaactgtccgtggatgaagctgcattacatgctgcagttatagccattaatgaagcagttgaaaaaggaatagcagagcaaaccgttgtaacactaagaaacccaaatgcggttttaactttagtggatgacaaccttgcaccagaatatcagaaagaactctgggatgccaaaaagaaaaaagaggaaaatgcaagactgaagaatagctgtatttcagaagaagaaagagatgcttatgaagaactgctgacacaagcagaaatccaaggcaatattaataaagtcaacaggcaggctgcagtggaccatatcaatgctgtcattccggaaggtgaccccgagaatacgctgcttgcactgaagaaaccagaggcccagctgcctgctgtttatccctttgctgctgccatgtatcagaacgaacttttcaacctccagaaacagaacaccatgaactacttggcccacgaggagcttttgattgctgtggaaatgttgtctgctgttgctttactaaaccaggccttggaaagcaacgatcttgtgtctgtgcagaatcaactcagaagccccgcaataggcttaaacaatctggacaaggcatatgtggaacgttatgcaaacacactactctctgttaaactagaagttttatcccaagggcaagataacttaagctggaatgaaattcagaattgtattgatatggttaatgctcaaattcaagaagaaaatgaccgagttgtagctgtagggtacatcaatgaagctattgatgaagggaatcctttgaggactttagaaactttgctcctacctactgcgaatattagtgatgtggacccagcccatgcccagcactaccaggatgttttataccatgctaaatcacagaaactcggagactctgagagtgtttccaaagtgctttggctggatgagatacagcaagccgtcgatgaggccaacgtggacgaggacagagcaaaacaatgggttactctggtggttgatgttaatcagtgtttggaaggaaaaaaatcaagtgatattttgtctgtattgaagtcttccacttctaatgcaaatgacataatcccggagtgtgctgacaaatactatgatgcccttgtgaaggcaaaagagctcaaatctgaaagagtgtctagtgacggttcatggctcaaactcaacctgcacaaaaaatatgactactattacaacactgattcaaaagagagttcctgggtcacacctgaatcatgcttctataaagaatcatggctcacaggaaaagaaatcgaggacattattgaggaagtcacagtaggttacattcgtgagaatatatggtctgcttcagaagagttgcttcttcgctttcaagccacaagctcaggacccatccttagggaagagtttgaagctagaaaatcatttttgcatgaacaagaagagaatgtggtcaaaatacaggctttttggaaaggatataaacaacggaaggagtatatgcacaggcggcaaacgttcattgataatactgattctgttgtgaagattcagtcctggttccgaatggcaactgcaagaaagagctatctttcaagactacagtatttcagagatcataataatgaaattgtgaaaatacagtcactgttgagagcgaacaaagctagagatgactacaaaacattggttggctctgaaaacccaccattaacagtaattcgcaaatttgtatacctgctggaccaaagtgatttggatttccaggaggaactagaggttgcacgattaagggaagaagtagtgaccaagatcagggccaatcaacagctggaaaaagacctgaacctgatggacatcaagattggactgctggtgaagaacaggatcacactagaggatgtaatttcacacagtaaaaagctgaacaagaaaaaaggaggagaaatggaaatactgaataacaccgacaaccaaggaataaaaagtttgagtaaggagaggagaaaaacactagaaacatatcagcagctgttttaccttttacagaccaaccctttatacttggctaagctgattttccagatgccacagaacaagtccactaaatttatggatactgttattttcacactatataattatgcctctaatcagcgagaagaatatctacttctcaagctttttaaaactgctctggaggaagaaataaaatcaaaagtggaccaggtacaggacatagttactggtaaccctacagtcatcaagatggtcgtcagcttcaatagaggtgcccggggacagaacaccctgcgccaactcctggctccagtggtaaaagagatcatcgacgacaagtcgctgattatcaacacaaaccctgtagaggtgtacaaggcttgggtgaaccaactagaaacacagactggagaggccagcaagttgccttatgatgtgaccacagaacaagctctaacatacccagaagtgaaaaataaactggaggcttccattgagaacctgagaagggtcaccgacaaagtcctgaattctatcatttcttcccttgatctactgccttatggattgaggtatatagccaaagtactgaagaattcgatccatgagaaattccccgatgcaacagaagatgagctattaaagattgttggaaacctcctgtactatcggtacatgaatccagccattgtagctccagatggctttgatatcatcgacatgacagctggaggtcagataaattctgaccaaaggagaaacttaggatcagtggccaaggttcttcagcacgcagcctccaacaagctgtttgaaggagaaaatgagcatctctcatctatgaacaattatttatcagagacgtatcaggaattcaggaaatatttcaaagaagcatgtaatgtccctgagccagaagagaagtttaatatggacaaatacacagacctggtgacagtcagcaaaccagtcatttatatttcaattgaagaaatcatcagcacacactcactcctgttggaacaccaggatgcaattgcccctgagaaaaatgacttactgagtgaattgctggggtcgctgggagaggtgccaaccgtggaatcttttcttggggaaggagcagttgaccccaatgaccctaacaaggcaaatacactaagtcagctttcaaagaccgagatttctcttgtcttgacaagcaaatatgacatagaggacggtgaagctatagatagccgaagcctcatgataaagaccaagaagctgataattgatgtgatccggaaccagccagggaacacattgacagaaatcttagagacaccagcaactgcgcaacaggaggtagaccatgccacggacatggtgagccgtgcaatgatagattccaggactccagaagaaatgaagcatagccaatctatgattgaagatgcacagctgcctcttgagcagaagaagaggaaaatccagaggaatcttcggacgttggaacagactggacacgtgtcatccgaaaataaataccaagacattctcaatgagattgccaaggatattcgaaatcaaagaatctatcgtaagcttcgaaaagctgaattggcaaaacttcagcagaccctgaatgcacttaacaagaaggcagcattttatgaagagcaaatcaattattatgacacctacataaagacttgtttagacaacttaaaaagaaaaaatactcggagatcaattaaactagatggaaaaggagaacccaaaggggcgaagagagcgaagccagtgaagtacactgcagcaaagctgcatgagaaaggtgtcctgctagatatagatgatcttcaaacaaaccagtttaagaatgttacatttgatatcatagctactgaagatgtaggcattttcgatgtaagatcaaaattccttggtgttgagatggaaaaggtgcaactcaatattcaggatttacttcagatgcaatatgaaggagtagctgtaatgaaaatgtttgataaggttaaagtgaatgtaaaccttctcatatacctgctgaacaagaagttctatggaaagtgaagtgcctacagaaatttcttggattctgtatcatctggattaggaaatgaatttgtttaatatttttgtttttaaacatgattgaaatcactgcttataaatgtgtgattttttttaaatgaccaaaactgttctgaagaatgtacccaggtgcctttttgctaatttgatactataatagaatgagacataaaatgaattaatggaaacatatccacactgtactgtgatataggtactctgatttaaaactttggacatcctgtgatctgttttaaagttggggggtgggaaatttagctgactagggacaaacatgtaaacctattttcctatgaaaaaagttttaaatgtcccacttgaataacgtaattcttcatagtttttttaatctatggataaatggaaacctaattatttgtaatgaattatttagacagttctaagccctgtcttctgggagttatcaattttaaagagaacttttgtgcaattcaaatgaagtttttataagtaattgaaaatgacaacacaataacactttctgtataaaagtatatattttatgtgatttattcctactaaatgaaagtgcactactgcctcatgtaaagactcttgcacgcagagcctttaagtgactaaggaacaacatagatagtgagcatagtccccacctccacccctcacaatttatttgaatacttcaattgtgcctctcaattttttgtaatgctaaaaaatcagtatctagatggtttttaaatgtattctctggaaattgttttatgtaaaataaatgttacttaattccatt

SEQ ID NO: 419 - DNA, 2017 bp, Homo sapiens
cggcccctcagggcacggctttagcggtgtcttttgcgagttcttcgtaagtacatcttaaagctgtcaagatggttctagcagaccttggaagaaaaataacatcagcattacgctcgttgagcaatgccaccattatcaatgaagaggtattgaatgctatgctaaaagaagtctgtaccgctttgttggaagcagatgttaatattaaactagtgaagcaactaagagaaaatgttaagtctgctattgatcttgaagagatggcatctggtcttaacaaaagaaaaatgattcagcatgctgtatttaaagaacttgtgaagcttgtagaccctggagttaaggcatggacacccactaaaggaaaacaaaatgtgattatgtttgttggattgcaagggagtggtaaaacaacaacatgttcaaagctagcatattattaccagaggaaaggttggaagacctgtttaatatgtgcagacacattcagagcaggggcttttgaccaactaaaacagaatgctaccaaagcaagaattccattttatggaagctatacagaaatggatcctgtcatcattgcttctgaaggagtagagaaatttaaaaatgaaaattttgaaattattattgttgatacaagtggccgccacaaacaagaagactctttgtttgaagaaatgcttcaagttgctaatgctatacaacctgataacattgtttatgtgatggatgcctccattgggcaggcttgtgaagcccaggctaaggcttttaaagataaagtagatgtagcctcagtaatagtgacaaaacttgatggccatgcaaaaggaggtggtgcactcagtgcagtcgctgccacaaaaagtccgattattttcattggtacaggggaacatatagatgactttgaacctttcaaaacacagccttttattagcaaacttcttggtatgggcgacattgaaggactgatagataaagtcaacgagttgaagttggatgacaatgaagcacttatagagaagttgaaacatggtcagtttacgttgcgagacatgtatgagcaatttcaaaatatcatgaaaatgggccccttcagtcagatcttggggatgatccctggttttgggacagattttatgagcaaaggaaatgaacaggagtcaatggcaaggctaaagaaattaatgacaataatggatagtatgaatgatcaagaactagacagtacggatggtgccaaagtttttagtaaacaaccaggaagaatccaaagagtagcaagaggatcgggtgtatcaacaagagatgttcaagaacttttgacacaatataccaagtttgcacagatggtaaaaaagatgggaggtatcaaaggacttttcaaaggtggcgacatgtctaagaatgtgagccagtcacagatggcaaaattgaaccaacaaatggccaaaatgatggatcctagggttcttcatcacatgggtggtatggcaggacttcagtcaatgatgaggcagtttcaacagggtgctgctggcaacatgaaaggcatgatgggattcaataatatgtaaagaaaatgtccttaatataaactgactcagttgaatacctaatttgctgagacctcagcgtttcccttctttttgcgaattggggggaaagtgtatttttcttgcttatcatgcactctttccttttcttctcgcccgcttttcccctccttttctttttccttccttctttcctccctttaatataagggagaaatacatggtttttgtggaaatcattatatgtttgctttagattttgttctgttttcaccatcataacacttaagttaaatcatgatgtaaaattttagtacttaaaggtttttaattatctcgaaggccaagcattgcatttgtaaacagtcctggtcagtagttaaataatgtttcaattaaagtgctgtaaaataaacttcaaagtggttataagttaaaaaaaaaaaaaaagg

SEQ ID NO: 420 - DNA, 1280 bp, Homo sapiens; identical to SEQ ID NO: 127

SEQ ID NO: 421 - DNA, 1493 bp, Homo sapiens
ggaagatgtagattccttcatgaaacagcctgggaatgagactgcagatacagtattaaagaagctggatgaacagtaccagaagtataagtttatggaactcaaccttgctcaaaagaaaagaaggctaaaaggtcagattcctgaaattaaacagactttggaaattctaaaatacatgcagaagaaaaaagagtccaccaactcaatggagaccagattcttgctggcagataacctgtattgcaaagcttcagttcctcctaccgataaagtgtgtctgtggttgggggctaatgtaatgcttgaatatgatattgatgaagctcaggcattgttggaaaagaatttatcgactgccacaaagaatcttgattccctggaggaagaccttgactttcttcgagatcaatttactaccacagaagtcaatatggccagggtttataattgggatgtaaaaagaagaaacaaggatgactctaccaagaacaaagcataatgctggcaattaaaaatgtggtttagttttccaaacatgttatcttaaatacccctttatccttacaggttgacataactttgaatgttttaacagcaagaattttaagaaaagataaacaccattttatttatttataaaaacaaaattagtttcaaatatttttgacattgtgatttttttttccacatttctcagcaaagctaatggtattttaatatcattattttttgcctgtcataagaaaactcttagctgaaatggccgaaaactgtgagacatgctatggaagctgaatgccggacgctagcacagtttactttttccctttctaattggctgatgttactctcacttgatgtggttaaaccattttagaggtagagaagacagacagtttgaatatttgtaaacttgtttttctttggtatatttaggacttagtggtcctctgttgctattgtcttctataagtggagtttcatgacttactgcttaacgaataactaactactatgatattctggacattttaggaaatggtaatttgccttgctacacattaagagggctattaagactacattttttctaacctcagataagtgcagtgtctttgcaatgccaacataagggagatcttggccaacgtgaaataaaattactcattcaaaactctgcctaaggtgattttgtagttcttaacagttctccagagcatcttgaacaggaatattaagataaatgtgaatctgcaatggctgaaaagagttgtgagcttttttattcatgataaaaccttataggaatagtataaaaaatccctgtggaaagctactagtacattgaccagcgctgggtgatacagattctgataaaaacataaatgtattagttcatctccatgtagtaaaaagtatacttatacaatgttttgtacttgtatttcatgaaattaaaacagtgatgctaaaacggccttcgtggcctc

SEQ ID NO: 422 - DNA, 2092 bp, Homo sapiens
attttaggtctcgaaggaagatcagtctatgaagaagattttgaggctccttttttggaaatgtctgcagaattttttcagatggaaagccagaaatttttagcagaaaatagtgcttcagtatatataaagaaagtagaagctagaattaatgaagaaatagaacgagtgatgcactgccttgacaaatcaacggaagaaccaattgtaaaggtggttgaaagggaactcatttccaagcacatgaagactatagtagaaatggagaattctgggctagtacatatgttgaaaaatggaaagacagaagaccttggttgcatgtacaagttatttagtcgtgtgccaaatggtttgaaaacaatgtgtgagtgtatgagttcctatttgagggagcaaggtaaagctcttgtttctgaagaaggagaaggaaagaatcctgttgactatatccagggcttattggatctgaagagtaggttcgatcgcttcctcctggaatcattcaacaatgaccgtctctttaaacaaactattgcgggtgactttgagtattttctcaacctcaactccaggtctcctgaatacctctcattatttattgatgataagctgaaaaagggagtcaaagggctaacagaacaagaagtagaaacaatattggataaagcaatggtcctttttaggtttatgcaagaaaaagatgtatttgaacgttattataaacaacacttggcaaggagacttctcacaaataaaagtgtttctgatgactctgaaaaaaacatgatatctaagttaaagactgaatgtggatgtcagttcacgtcaaaactggaaggaatgtttagggatatgagcatctcaaacacaacgatggatgaattcaggcaacatctacaggcaactggtgtatctttaggtggtgttgatcttacagtccgggtgctcacgacaggatattggcccactcagtcagccacaccaaagtgcaacatcccaccagcaccaagacatgcttttgagatattcagaaggttctacttagccaaacacagtggtcgacagctcacactccagcatcatatgggttctgcagatctcaatgccacattttatggaccagttaaaaaggaagatggatctgaagttggtgttggaggtgcacaagtaactggctctaatacacggaagcacatattgcaagtttccactttccagatgaccatattaatgctctttaataatagagaaaaatacacatttgaggaaattcagcaagagacagatatccctgaaagagagcttgttagagccctacagtccctcgcctgtggtaaaccaacacagcgggttcttacaaaagaacccaaatcaaaggaaatagaaaatggtcatatatttacagttaatgatcaattcacatccaaactacacagagtcaagattcaaacagttgctgccaaacaaggtgaatccgacccagagaggaaagaaacaaggcagaaagtagacgacgacagaaaacatgagatagaagctgctatagtgcggataatgaaatctagaaagaagatgcagcacaatgttctagtagcggaggtaactcagcagttgaaggcgcgattcttaccaagtccagttgttattaagaaacgtattgaaggacttattgagagagaatatttggcacgaacacctgaggatcgcaaagtatacacatatgtagcataaaatgcgttcagaaatttgatttattcttggactgtactcttcgcatggactgggaagttcttttaaatcattaaatattaagacgaccatctcttctattaaattacagtacatgttctagaccattgagatcaagcctttactccctttgagagtttccaacatcagttgattgagcttcaggctttacaacgtttatccctgtagagatcatctttacagttcctcgggaaaatgtgaatgtgctgcgttttgttttctttactgtatgaaaacagggaaataaaagaggaatttaggaaatacagctcattacaataaaattgttggatttcatttcaaaaaaaaaaaaaaaaaa

SEQ ID NO: 423 - DNA, 3362 bp, Homo sapiens; identical to SEQ ID NO: 128

SEQ ID NO: 424 - DNA, 6981 bp, Homo sapiens
ttgctgcgtcaactgtgttccctttggcctggctgagtttgatactgtggggattcagtttaggcgctggcccgaggatatcccagcggtggtacttcggagacacctgtctgcatctgactgagccggctctcctggcctcgcgctgcacattctctcctggcggcggcgccacctgcagtagcgttcgcccgaacatggcgacacggagcagcaggagggagtcgcgactcccgttcctattcaccctggtcgcactgctgccgcccggagctctctgcgaagtctggacgcagaggctgcacggcggcagcgcgcccttgccccaggaccggggcttcctcgtggtgcagggcgacccgcgcgagctgcggctgtgggcgcgcggggatgccaggggggcgagccgcgcggacgagaagccgctccggaggaaacggagcgctgccctgcagcccgagcccatcaaggtgtacggacaggttagtctgaatgattcccacaatcagatggtggtgcactgggctggagagaaaagcaacgtgatcgtggccttggcccgagatagcctggcattggcgaggcccaagagcagtgatgtgtacgtgtcttacgactatggaaaatcattcaagaaaatttcagacaagttaaactttggcttgggaaataggagtgaagctgttatcgcccagttctaccacagccctgcggacaacaagcggtacatctttgcagacgcttatgcccagtacctctggatcacgtttgacttctgcaacactcttcaaggcttttccatcccatttcgggcagctgatctcctcctacacagtaaggcctccaaccttctcttgggctttgacaggtcccaccccaacaagcagctgtggaagtcagatgactttggccagacctggatcatgattcaggaacatgtcaagtccttttcttggggaattgatccctatgacaaaccaaataccatctacattgaacgacacgaaccctctggctactccactgtcttccgaagtacagatttcttccagtcccgggaaaaccaggaagtgatccttgaggaagtgagagattttcagcttcgggacaagtacatgtttgctacaaaggtggtgcatctcttgggcagtgaacagcagtcttctgtccagctctgggtctcctttggccggaagcccatgagagcagcccagtttgtcacaagacatcctattaatgaatattacatcgcagatgcctccgaggaccaggtgtttgtgtgtgtcagccacagtaacaaccgcaccaatttatacatctcagaggcagaggggctgaagttctccctgtccttggagaacgtgctctattacagcccaggaggggccggcagtgacaccttggtgaggtattttgcaaatgaaccatttgctgacttccaccgagtggaaggattgcaaggagtctacattgctactctgattaatggttctatgaatgaggagaacatgagatcggtcatcacctttgacaaagggggaacctgggagtttcttcaggctccagccttcacgggatatggagagaaaatcaattgtgagctttcccagggctgttcccttcatctggctcagcgcctcagtcagctcctcaacctccagctccggagaatgcccatcctgtccaaggagtcggctccaggcctcatcatcgccactggctcagtgggaaagaacttggctagcaagacaaacgtgtacatctctagcagtgctggagccaggtggcgagaggcacttcctggacctcactactacacatggggagaccacggcggaatcatcacggccattgcccagggcatggaaaccaacgagctaaaatacagtaccaatgaaggggagacctggaaaacattcatcttctctgagaagccagtgtttgtgtatggcctcctcacagaacctggggagaagagcactgtcttcaccatctttggctcgaacaaagagaatgtccacagctggctgatcctccaggtcaatgccacggatgccttgggagttccctgcacagagaatgactacaagctgtggtcaccatctgatgagcgggggaatgagtgtttgctgggacacaagactgttttcaaacggcggaccccccatgccacatgcttcaatggagaggactttgacaggccggtggtcgtgtccaactgctcctgcacccgggaggactatgagtgtgacttcggtttcaagatgagtgaagatttgtcattagaggtttgtgttccagatccggaattttctggaaagtcatactcccctcctgtgccttgccctgtgggttctacttacaggagaacgagaggctaccggaagatttctggggacacttgtagcggaggagatgttgaagcgcgactggaaggagagctggtcccctgtcccctggcagaagagaacgagttcattctgtatgctgtgaggaaatccatctaccgctatgacctggcctcgggagccaccgagcagttgcctctcaccgggctacgggcagcagtggccctggactttgactatgagcacaactgtttgtattggtccgacctggccttggacgtcatccagcgcctctgtttgaatggaagcacagggcaagaggtgatcatcaattctggcctggagacagtagaagctttggcttttgaacccctcagccagctgctttactgggtagatgcaggcttcaaaaagattgaggtagctaatccagatggcgacttccgactcacaatcgtcaattcctctgtgcttgatcgtcccagggctctggtcctcgtgccccaagagggggtgatgttctggacagactggggagacctgaagcctgggatttatcggagcaatatggatggttctgctgcctatcacctggtgtctgaggatgtgaagtggcccaatggcatctctgtggacgaccagtggatttactggacggatgcctacctggagtgcatagagcggatcacgttcagtggccagcagcgctctgtcattctggacaacctcccgcacccctatgccattgctgtctttaagaatgaaatctactgggatgactggtcacagctcagcatattccgagcttccaaatacagtgggtcccagatggagattctggcaaaccagctcacggggctcatggacatgaagattttctacaaggggaagaacactggaagcaatgcctgtgtgcccaggccatgcagcctgctgtgcctgcccaaggccaacaacagtagaagctgcaggtgtccagaggatgtgtccagcagtgtgcttccatcaggggacctgatgtgtgactgccctcagggctatcagctcaagaacaatacctgtgtcaaagaagagaacacctgtcttcgcaaccagtatcgctgcagcaacgggaactgtatcaacagcatttggtggtgtgactttgacaacgactgtggagacatgagcgatgagagaaactgccctaccaccatctgtgacctggacacccagtttcgttgccaggagtctgggacttgtatcccactgtcctataaatgtgaccttgaggatgactgtggagacaacagtgatgaaagtcattgtgaaatgcaccagtgccggagtgacgagtacaactgcagttccggcatgtgcatccgctcctcctgggtatgtgacggggacaacgactgcagggactggtctgatgaagccaactgtaccgccatctatcacacctgtgaggcctccaacttccagtgccgaaacgggcactgcatcccccagcggtgggcgtgtgacggggatacggactgccaggatggttccgatgaggatccagtcaactgtgagaagaagtgcaatggattccgctgcccaaacggcacttgcatcccatccagcaaacattgtgatggtctgcgtgattgctctgatggctccgatgaacagcactgcgagcccctctgtacgcacttcatggactttgtgtgtaagaaccgccagcagtgcctgttccactccatggtctgtgacggaatcatccagtgccgcgacgggtccgatgaggatgcggcgtttgcaggatgctcccaagatcctgagttccacaaggtatgtgatgagttcggtttccagtgtcagaatggagtgtgcatcagtttgatttggaagtgcgacgggatggatgattgcggcgattattctgatgaagccaactgcgaaaaccccacagaagccccaaactgctcccgctacttccagtttcggtgtgagaatggccactgcatccccaacagatggaaatgtgacagggagaacgactgtggggactggtctgatgagaaggattgtggagattcacatattcttcccttctcgactcctgggccctccacgtgtctgcccaattactaccgctgcagcagtgggacctgcgtgatggacacctgggtgtgcgacgggtaccgagattgtgcagatggctctgacgaggaagcctgccccttgcttgcaaacgtcactgctgcctccactcccacccaacttgggcgatgtgaccgatttgagttcgaatgccaccaaccgaagacgtgtattcccaactggaagcgctgtgacggccaccaagattgccaggatggccgggacgaggccaattgccccacacacagcaccttgacttgcatgagcagggagttccagtgcgaggacggggaggcctgcattgtgctctcggagcgctgcgacggcttcctggactgctcggacgagagcgatgaaaaggcctgcagtgatgagttgactgtgtacaaagtacagaatcttcagtggacagctgacttctctggggatgtgactttgacctggatgaggcccaaaaaaatgccctctgcttcttgtgtatataatgtctactacagggtggttggagagagcatatggaagactctggagacccacagcaataagacaaacactgtattaaaagtcttgaaaccagataccacgtatcaggttaaagtacaggttcagtgtctcagcaaggcacacaacaccaatgactttgtgaccctgaggaccccagagggattgccagatgcccctcgaaatctccagctgtcactccccagggaagcagaaggtgtgattgtaggccactgggctcctcccatccacacccatggcctcatccgtgagtacattgtagaatacagcaggagtggttccaagatgtgggcctcccagagggctgctagtaactttacagaaatcaagaacttattggtcaacactctatacaccgtcagagtggctgcggtgactagtcgtggaataggaaactggagcgattctaaatccattaccaccataaaaggaaaagtgatcccaccaccagatatccacattgacagctatggtgaaaattatctaagcttcaccctgaccatggagagtgatatcaaggtgaatggctatgtggtgaaccttttctgggcatttgacacccacaagcaagagaggagaactttgaacttccgaggaagcatattgtcacacaaagttggcaatctgacagctcatacatcctatgagatttctgcctgggccaagactgacttgggggatagccctctggcatttgagcatgttatgaccagaggggttcgcccacctgcacctagcctcaaggccaaagccatcaaccagactgcagtggaatgtacctggaccggcccccggaatgtggtttatggtattttctatgccacgtcctttcttgacctctatcgcaacccgaagagcttgactacttcactccacaacaagacggtcattgtcagtaaggatgagcagtatttgtttctggtccgtgtagtggtaccctaccaggggccatcctctgactacgttgtagtgaagatgatcccggacagcaggcttccaccccgtcacctgcatgtggttcatacgggcaaaacctccgtggtcatcaagtgggaatcaccgtatgactctcctgaccaggacttgttgtatgcaattgcagtcaaagatctcataagaaagactgacaggagctacaaagtaaaatcccgtaacagcactgtggaatacacccttaacaagttggagcctggcggaaaataccacatcattgtccaactggggaacatgagcaaagattccagcataaaaattaccacagtttcattatcagcacctgatgccttaaaaatcataacagaaaatgatcatgttcttctgttttggaaaagcctggctttaaaggaaaagcattttaatgaaagcaggggctatgagatacacatgtttgatagtgccatgaatatcacagcttaccttgggaatactactgacaatttctttaaaatttccaacctgaagatgggtcataattacacgttcaccgtccaagcaagatgcctttttggcaaccagatctgtggggagcctgccatcctgctgtacgatgagctggggtctggtgcagatgcatctgcaacgcaggctgccagatctacggatgttgctgctgtggtggtgcccatcttattcctgatactgctgagcctgggggtggggtttgccatcctgtacacgaagcaccggaggctgcagagcagcttcaccgccttcgccaacagccactacagctccaggctggggtccgcaatcttctcctctggggatgacctgggggaagatgatgaagatgcccctatgataactggattttcagatgacgtccccatggtgatagcctgaaagagctttcctcactagaaaccaaatggtgtaaatattttatttgataaagatagttgatggtttattttaaaagatgcactttgagttgcaatatgttatttttatatgggccaaaaacaaaaaaaaaaaaaaaaaa

SEQ ID NO: 425 - DNA, 2016 bp, Homo sapiens
ggcacgaggagcagcgcccgcgccctccgcgccttctccgccgggacctcgagcgaaagacgcccgcccgccgcccagccctcgcctccctgcccaccgggcccaccgcgccgccaccccgaccccgctgcgcacggcctgtccgctgcacaccagcttgttggcgtcttcgtcgccgcgctcgccccgggctactcctgcgcgccacaatgagctcccgcatcgccagggcgctcgccttagtcgtcacccttctccacttgaccaggctggcgctctccacctgccccgctgcctgccactgccccctggaggcgcccaagtgcgcgccgggagtcgggctggtccgggacggctgcggctgctgtaaggtctgcgccaagcagctcaacgaggactgcagcaaaacgcagccctgcgaccacaccaaggggctggaatgcaacttcggcgccagctccaccgctctgaaggggatctgcagagctcagtcagagggcagaccctgtgaatataactccagaatctaccaaaacggggaaagtttccagcccaactgtaaacatcagtgcacatgtattgatggcgccgtgggctgcattcctctgtgtccccaagaactatctctccccaacttgggctgtcccaaccctcggctggtcaaagttaccgggcagtgctgcgaggagtgggtctgtgacgaggatagtatcaaggaccccatggaggaccaggacggcctccttggcaaggagctgggattcgatgcctccgaggtggagttgacgagaaacaatgaattgattgcagttggaaaaggcagctcactgaagcggctccctgtttttggaatggagcctcgcatcctatacaaccctttacaaggccagaaatgtattgttcaaacaacttcatggtcccagtgctcaaagacctgtggaactggtatctccacacgagttaccaatgacaaccctgagtgccgccttgtgaaagaaacccggatttgtgaggtgcggccttgtggacagccagtgtacagcagcctgaaaaagggcaagaaatgcagcaagaccaagaaatcccccgaaccagtcaggtttacttacgctggatgtttgagtgtgaagaaataccggcccaagtactgcggttcctgcgtggacggccgatgctgcacgccccagctgaccaggactgtgaagatgcggttccgctgcgaagatggggagacattttccaagaacgtcatgatgatccagtcctgcaaatgcaactacaactgcccgcatgccaatgaagcagcgtttcccttctacaggctgttcaatgacattcacaaatttagggactaaatgctacctgggtttccagggcacacctagacaaacaagggagaagagtgtcagaatcagaatcatggagaaaatgggcgggggtggtgtgggtgatgggactcattgtagaaaggaagccttgctcattcttgaggagcattaaggtatttcgaaactgccaagggtgctggtgcggatggacactaatgcagccacgattggagaatactttgcttcatagtattggagcacatgttactgcttcattttggagcttgtggagttgatgactttctgttttctgtttgtaaattatttgctaagcatattttctctaggcttttttccttttggggttctacagtcgtaaaagagataataagattagttggacagtttaaagcttttattcgtcctttgacaaaagtaaatgggagggcattccatcccttcctgaagggggacactccatgagtgtctgtgagaggcagctatctgcactctaaactgcaaacagaaatcaggtgttttaagactgaatgttttatttatcaaaatgtagcttttggggagggaggggaaatgtaatactggaataatttgtaaatgattttaattttatattcagtgaaaagattttatttatggaattaaccatttaataaagaaatatttacct

SEQ ID NO: 426 - DNA, 1156 bp, Homo sapiens
ggcacgaggaagagcggtcggcggggtttcttcgttgcattgcctgagaggagcggagtctgccaggtggtgtccatcatgttctctttcaacatgttcgaccaccctattcccagggtcttccaaaaccgcttctccacacagtaccgctgcttctctgtgtccatgctagcatggcctaatgacaggtcagatgtggagaaaggagggaagataattatgccaccctcggccctggaccaactcagccgacttaacattacctatcccatgctgttcaaactgaccaataagaattcggaccgcatgacgcattgtggcgtgctggaatttgtggctgatgaaggcatctgctacctcccacactggatgatgcagaacttactcttggaagaagacggcctggtccagttggagaccgtcaaccttcaagtggccacctactccaagagtaagttctgctacctcccacactggatgatgcagaacttactcttggaagaaggcggcctggtccaggtggagagcgtcaaccttcaagtggccacctactccaaattccaacctcagagcgctgacttcctggacatcaccaaccccaaagccgtattagaaaacgcacttaggaactttgcctgtctgaccaccggggatgtgattgccattaactacaatgaaaagatctacgaactgcgtgtgatggagaccaaacccgacaaggcagtgtccattcatgagtgtgacatgaacgtggactttgatgctcccctgggctacaaagaacccgaaagacaagtccagcatgaggagtcgacagaaggtgaagccgaccacagtggctatgctggagagcttggcttccgcgctttctctggatctggcaatagactggatggaaagaagaaaggggtagagcccagcccctccccaatcaagcctggagatattaaaagaggaattcccaattatgaatttaaacttggtaagataactttcatcagaaattcacgtccccttgtcaaaaaggttgaagaggatgaagctggaggcagattcgtcgctttctctggagaaggacagtcattgcgtaaaaagggaagaaagccctaagtgaggactgttggctgattggaaaataataaaagtttcatttgca

SEQ ID NO: 427 - DNA, 267156 bp, Homo sapiens
gatcttggctcgctgcaagctccgcctcctgggttcacgccattctcccacctcagcctcccgagtagctgggactacaggcgcccaccaccacgcccggctaattttgttttagtatttttagtagggacagggtttcaccatgttagccaggacggtctcgagctcctgacctcgtgatgcgcccgcctcggcctcccaaaatgctgggattacagtcgtgagccaccgcgcccagcccagcaaaggctacctttttaagatgtatggtaataaaaaggagatgcggtagtagctcgatataaatagaattaggtaaaagtattatcagaacagagtactctggagcataaatgtagcttgaaaaagcagagaaggtatagggaagaatcgatggaataaattctacagaggcagaagtgcttggaatctggagcactgtgggaggatgagctaagagtagggagagaagaatggtgaaggtgaagattgatgacgactttgacgacagtgagcaatcaattttaagcacttattgtgcacaagccgaacattatgtaccttattgccactaactaggtactattatctccattctatagatgataaaatgttaagtaacttgtctgagtttgcacagctattaagtacaagagttgggatttcaacccatgtctacctgacttgggagcctaaattcctaaccactcgcctctgctttatcatcatagtctttaacaccactgctatgtgaactcctatgactacatgcttgctgtctcgcacagaataaccaaacagtagtctccacacttcaggtaatctatcctttgttcaacccagattctcttgcatttgtaaccttctgacctccccggcaaggtacccatttgcatttgcacatccccacactaacatgcagtgaaatagtctcttagccactctcttcagtgctcctcagagaggtgacaatcatcagtaactgtgaccccattgagagtgtggtttctgaccacgctcaagattatttgctgcaattgaagcagttagtagttgcttattcttttcttttccttgtttgcagatacctatgaaaatggaaattattttttggcaaactttatagcagctcaggtaagactaatttactacattttacaaatcttttcccaggtgtctacagattaaacattacagttaactgcgtaaatgtaatatcccacatcttaataggaggttcttcttgcctttacttttataatccaggtctgttgtcattaaagtaaggaagaaacaatccttactttggcagttttccagtatactatctccatgaaaagaaacttggaattcatacaatgctggggaaaaaatggggccttaaatgtgtaacatgttttccaaagatgagaaatttactagctgataaattttgaaagaaaaatgctatataagctacttattatgcaataatgcataaaagacgacctcaaaaccttagtggtatctaacaataagcacttacttagctcatgagcttgcagggctcagaggatgtgggtctggtcttggctgatctttgctagctcacatacatctccagttagtcttgggtctattgggctgtttagataatcttggctgtattcacatatctggggggtcagctgactctcatatgatttatcatggccttgtgggaaggtctaggcacggcttcttcataattatggaagagggctaaaataaaaataaaagtggagatcccttagttctttataatttttttgtatcgagttgactaatttcccattaccaaagcaaaatcacatggtcaagcccagagacagaggagggacagaatgcctcaactggagtgggagggcattgcaaaactgcatggaaaggggtatggatttgtaagggttgaatatttcataacagtgatgcaatcaatgcaccttgcatattaaatatcccattggtaatctacataattttaattagagtatgaggagaatcattctaggtcaaactggattctgcttctctatttttacctagtcactttaaccaagaagtaatatagcacaaatctattttttttctataacagtgattcacatatttgaagatgtctctcagttatttcttttgtcttcttagaattatacatcaccaggctaacttcatattttctctatttcctgcttatagtggtttccaggtctgatcattctgtttagactccagttaacttagatttcttttaaaacatcagaaccgagagcatattttagagctgtctatccagtatgatagccactagccacatgtggctattgaacacttgaaatgtgaccagcctaatttgaaatattcaaaagttagcttaaaaaattcaaaaatgatttgtgggcttcctgggcaagatggccaaataggaacagctctggcctgcagctcccagtgagatcaatgcagaaggcaggtgatttctgcatttccaactgagatacctggttcatctcactgggactgattagacagtgggtgaagtccacagagggcgaggagaagcagggtgtggtgtcacctcccccaggaagcacaaggggtcagggtactccccccgtagccaaaggaagccacgagggacagtgctatctggcccagatactacacttttcccatggtctttgcaacccatagagcaggagattccctcaggtgcctacaccaccaggaccctgggtttcaagcacaaaactgagtggccgtttgggcagataccaaactagcttcaggagtttttttttttcataccctagtggtgcctggaacaccagtgagacagaaccattcactcccctggaaagccagggagccgagtgcccttgctcagcggatcccaaccccacagagcccagcaagctaagatccacaggcttgaaatactcgccgccagcacagctgtctgaagttgacgtgggaagctcgagtttggtggagggaggggcatccgccattactgaggcttgagtaggcggttttcccctcacagtgtaaacaaagccaccaggaagttcgaactgggcagagcccaccacagctccacaaagccgctgtagcaagactgcctttctagattcctcctgtctgggcagggcatctctgaaaaaaaggcagcagccccagttaggggcttgtagataaaactcccatctctctgggacagacacctgggggaaggggctgctgtggatgcagcttcagcagacttaaaccttcctgcctgccagctctgaagagagcagtggatctcccagcacagtgctggagctctgctaagggacagactgcctcctcaagtgggtccctgacccccgtgcctcctgacagggagatacctcccagcaggggtcaacagacacctcatacaggagagctccagctggaatctggtgggtgcccctctgggatgaagcttccagaggaaggagcaggcagcaatcttaactgttctgcagtctccactggtgatacccaggcaaacatggtctggagtggacctccagcaaactccagcagacctgcagaagaggggcctgactattagaaggaaaactaacaaacggaaagcaatagcatcaacatcaacaaaaaggatgaccatgcaaaaaatccatccgaaggtcaccaacagcaaagaccaaaggtagataaatccacgaagatgaggaaaacccagtgcaaaaagcctaaagattccaaaaaccagaatgccccttctcctccaaaggatcacaactcctcaccagcaagggaacaaaactggagagagaacgaatttgatgaactgacagaaataggcttcagaaggtgggtaataacaagctcctccgagctaaaggagcatgttctaacccaatgcaaggaagctaagaaccttgataaaaggttagaggaattgctaactagaataaccagtttagagagaacataaatgacctgatggagctgaaaaatatagcatgagaacttcgtgaagcaaacacaagtatcaatcactgaatagatcaagcaaaagaaaggatatcagagattgaacagcaacttaatgaaataaagcgtgaagacaaaattagagaaaaaagaatgaaaaggaacaaacaaagcctccaagaaatatgggactatgtgaaaagaccaaacctacatttgattggtgtagctgaaagtgacgaggagaatggaaccaagttgtaaagcacacttcaaggtattatccaggagaattttccaacctagcaagacaggccaacattcaaattcaggaaatacagagaacaccacaaaaatattcctcaagaagagcaaccccacgacacataattgtcagattcaccaaggttgaaatgaaggaaaaaatgttaaggtcagccagagaggaaggttgggttacccacaaagggaagcccatcagactaacagcagatctgtctgcagaaacctcacaagccagaagagaatgggggccaatattcaacattcttaaagaaaagaattttcaacccagaatttcaaatccagccaaactaagcttcataagtgaaggggaaataaaatcctttacaagcaatccatttacaagcaaatgctgagggatttggtcaccactaggcctgccttacaagagctcctgaaggaagcactaaatatggaaaaggaaaaatgagtatcagctcctgcaaaaataaaccaaaatgtaaagaccattgacactatgaagaaactgcatcaactaatgggcaaaataaccagctagcatcataatgacaggatcaaattcacaaatagcagtattaaccttaaatgtaaatgggctaaatgctctgattaaaaggcacagactggcaaattggataaagagtcaagacccactggtgtgctgtattcagaagacccatctcatgtgcaaagacacactaggctcaaaataaagggatggaggaagatttgcccatcaaatgggaagtaaaaagaaaaagcaggggttgcaattttcatctctgataaaacagattttaaaccaacaaatatcaaaaaagacaaagaaggccattacataatgttaagagctaactaccataaatatatatgcacccaatacagaagcacccacattcataaggcaagtccttagagacctacaaagagacttagactctcacacaataatagtgggagattttaacacccactgtcaatattagacagaccaacaagacaggaaattagcaaggatattcagaacttgaactcagctctggaccaagcagatgtaatagacatctacagaactctccaccctaaatcaacagaatatacattcttctcagcaccaatagcacttattcgaaaatcaaccacataattggaagtaatacgctcctcagaaaatgaaaaagaacagaaatcataacaaagagtctctcagaccgcagtgcaatcaaattagaactcaggattaagaaactcactcaaaaccacacaactacagggaaactgaacaacctgctcctggatgactactgagtaaataatgaaattaaggcagaaataaataagttctttgaaaccaacaaaaacaaagacacaacatatcaaaatctctgggagttttcagagggaaatttatagcactaaatgcccacaggagaaaacaggaaggatctaaaatcaacaccctaacatcatagttaaaagagctagagaagcaagggcaaaaaagttcaaaagctagcagaagacaaaaaataactaagatcagagcagaactgaaggagagagagacacgaaatacccttcaaaaaaatcagtgactccaggagctggttttttgaaatgattaacagaatagttagaccgctagccagactaataaagaaaaaaagagagaagaatcaaatagacacaataaaaaatggtagagaggagatcaccgctgatcccacagaaatacaaactaccatcagagaatactataaacatataaacacctctatgcaaataaactagaaaatctagaagaaattgataaattcctggacacatacaccctctgaaggtaaaaccagggagaagttgaatccctgagtagaccaataacaaggtctgaaattgaggcactaaattaagagcctaccaaccaaaacagcccaggaccagacagattcacagccgaattctaccagaagtacaaagaggaactggtaccgttcctcctgaaactattccaaacaagagggactctgccctaactcattttatgaggtcagcatcatcctgataccaacacctggcagagacacaataaaaaaagaaaatttcaggccagtatccctgatgaacatcaatgcaaaagtcctccataaaatactggcaaaccgaatccagcagcacatcaaaaagccatgatcaagttggcttcatccttgggatgcaaggctggttcaacatatgcaagtcaataattgcaatccatcacataaacagaaccaatgacaaaaaccacatgattatctcaatagattcagaaaaggcctttgataaaattcaacaccctttcatgctaaaaacactcaataaactgggtattgatggaacaaatataaaaataatatgagctatttatgacaaaccaacagctaatatcatattgaataggaaaaagctggaagctttccctttgaaaaccggcacaagacaaggatgccctctctcaccactcctattcagcatagtattggaagttctggccagggcaatcaggcaagagaaagaaataaagcttattcaaataggaagagaggaagccaaattatctctatttgcagatgatgtgattgtatatttagaaaaccccattgtctcagccgaaaatctcattaaggtgataagcaacttcagcaaagtctcaggatacaaaatcaatgtgcaaaaatcacaagcatttcgatacaccaataatagacagccaaatcatgagcaaactcccactcacaattgctacaaagagaagaagatacctaggaatacaacttacaagggatgtgaaggacctcttcaaggagaactacaaaccactactcaaggatataagagaggacacaagcaaatggaaaaacattccatgctcatggataggaagaatcagtatcgtgaaaatggtcatacttcccaatgcaaatcaaaaccacaatgagatatcatctcatgccagttagaatggccattatcaaaaagtcaggaaacagcagatgctggagaggatgtggagaaataggaatgcttttacactgtcagtgggagtgtaaattagttcaaccattgtggaagacagtgtggtgattcctcaaggatctagaaccagaaataccatttcacccagcaatcccattactgggtatatacccaaagggttataaatcattctgctataaagaaacaggcacaagtctgtttactgcagcactgttcacaatagcaaagacttagaaccaacccaaatgcccatcagtgttagaccagataaagaaaatgtggcacatatataccatggaatagtatgcagccataaaaaagaatgagttcatgcccttttcaggctcatggatgaagctggaaaccatcacactcagcaaactaacacaggaacagaaaaccaaacactgcatgttgtcactcatatgtgggagttgaataatgagaacatatgggcacagagaggggaacttcacacaccagggcctgttgggggtggagggcaaggagacagatagcattaggagaaatccctaatgtagatgacgggttgatgggttgatggatgcagcaaaccaccatggcacatgtatacctatgtaacaaacctgcatgttctgcacatgtatcccagaacttaaagtataattaaaaaaaaaaaaaaacatttggctgagcgtggtggctcatgcctgtaatgccagcactttgggaagccaaggcaggtggatcacctgaggtcgggagtttgagaccagcctgaccaacatggagaaaaccctgtctctactcaaaatccaaaaattaggcgtggtggcgcatgcctgtaatccccactacttgggaggctgaggcgggagaatcgcttgaacctgggaggcagaggttgtggtgagccgagatcgcgccattgcactccagcctgggtagcaagagcgaaactctgtctcaaaaaaaaaaaaaaaaaacctcatgaataactttatattgaaaaatgttgtaataataacattttggctatatcatgtaaataaaatatattttgaaattaatgtaccctttttcttttcactttttaaaaaaatgtgactactagaaaatattcaattacatatatagtttcccttatatttctataagatggcatagacttccatgttgcctactacctctttttagctagagtctatattttttctgctgttattacattgtgttattttttaacacatgtatcagatgtttggcacatataaatctcatggtcagctaagaccttcaaattattctcatagacatgattatcaggtcatattgttccatcctgcatttggcctctctgaaactaactgctagactttgtatactaattaaatttgtgtattctctgcccttaagagtagttgggttgaagactctacatattttttcctctcaaatattattttaatgaatattattttaatgatctggaagtcctgaattttagttctatttctactgctattattcaaattcggagagacactgtttaatctgtgttttttaaaaaattgtaaaacattagattgccctttaataacatctaacttcaaaattccatttttctgataaatgaattcttatttctgtgatgtttgatagattatttccttaagaataaggggcctgaaatgaaagaaagatcgcaactttccttaggggataactattatcagcggtttcctggttggtaaaccagcttgtgggggtgggagatgatttgtaacatttgctaatttctgtagtgtagcttctcccaccatcttaaccaatttcaagcatcagctggcttgcaaaattctaggaaatttaaaaatcaactctctcaaatcaataagaactagctttagtacacccatttattttgagctgtatattttttccttgattctgcctgcccagtagcaaaagtcttgttcatccttcatgatgccaattgaacatgtttcttttttctcttcctactgcagccatcataattgagaaatgcatagcttccctctgctacaactatctccttgattattgcatgtaatcttcaaaatctttccttacatacctaactggcctcacgtctctgtttgctcagcaccagctatggttgtccttgcactcctccatgaatgtggctttgttcaatgtgtccctgtacccctatttcctgtctcataataaatccttcccatgattaccaggagttccgaagttacatgtccttcctaagttctctcttgaccctcttcctcccatgtaatttttcctttctcttcacatccatgaaaaatatccactatgattttcatttgggccttcatcatgtgccacctcataatttatgtcatattattttaacccttgtattgatacttaaacaattcatgatttggttaacttcctatgtttcttgcacactgtcctcagtctagggactgtttgccacacttctttgttcactctaaattaacttgtgcagtactatgtacaggggcaccttgcgcttccaactttacctatgttatctagccttgtcgctttggactactcacttcattttccagagcctcagtttccttatctctaagatagcaataatgatattttcttttcaaaatgattataagaatacttatgatatagggaaaataactttcataatgctggtacaataaacttatttgtggcattacccaatttattatagcaggtactcaggaagtatgtcttcatgaagtgtgtggagagtagaattatagtaaccagaggctgggaaggggtgggggccataaagagaggttggttagtgggaacaaagagacagttaaatagcaggagtgagttcttgtgtttgctaacatactagggtgatgatagttaacaacaatttattgtatatttcaaaatagctagaagagaatatttgaaatgtttccaacacgaagaaatgatgaatgtggcttggtgtggtggctcacacctgtaatcccatcactttgggaggccgaggcaggaggatcacgtggtcagggatttgagaccagcctggccaacatagtgaaaccccgtctctattaaaaatacaaaaattagccgggtatggtggcacacacctatagtcccagctgcttaggaggctgaggcaggagaatcgcttaaacccaggaggcggaggttgcagtgagcccagaccacgccattgcactccagcctgggtgacagagtgagactccatctcaaaacaaacaaacaaacaaacaaatgttgactatttgaggtcatggatatcctaaataccctgatttgatcactacacattgtatacatgtatcaaaatatcacatgttctccataaatatgtataattattatgtatcaataaaaatttaaatacataaatagaaatagcaaactaatataacaaaagtaaatttaggtttgttaatattttaatatggaccatagtctatcaacaatatgttatgtattcttttctctttataaattctttatagaacatcctgcaaatccagaccatacacaataagtatttgagtgactcgaatccactaaaagttgggtatattagaatctggggtgtgaatacctatgtgacacaagtcagtttcacctatgacaaccggcaatttatggagacaaatttcaagagtgaaccttataatcaggtaggtctgaaaggaatattagcatatcacaagtaaattttatcattctgcaaaattatcaccaataattttgctaacaattaaaattatcattgttaaattttcatgtattagatggttataaatacgtgcaatagatatgttcctgaaaagttgcaaatgttgaatcatattgtaaaatatgcaacattaatggtctttccagtatggcctaggggtcagtgatcactggcctgatgagatcctctccatgtatttaccaaagagactgtgctatgttttgataggttagtcttccacattagcaaaataaaacttatttctgctgcagaggctaaaacaaaggaaagggtgattccctaaagctgttgaaggttgcccccatgcttcctgcagttattcatgtccctggtcaaattgatggatcttataggtagacgaaaattggcagtaaactgtggtaatcttcgaatgaatacatcccacctgtggtataggataaaaggttgataaaacagggggacataaatagcaggccctactagaggattctagaatcaactaaaccagaattttggaagatgaaataccaatagttaccaaaggcaaccacaaagaaaaaagtatctcacttttagaacataagacaacataaatacggaaccagcaacccaaaagggatggtttagaaaagtgaaaatggataaccatagttcttgttttctaaaacgtgaaatgagtgccctgatggtatttggactttggaaaatggcccctctgagcactcaaatagatcttctccctctaggctcttctgggtatttaccttaaagcattttacctggactattgagttcaaaaccactctttgcaagtaattgcttctagttaagattgtgcagaaaatccttgaataccttctttttaaaaactctatggcatatctgatgcctattatgtgccagacaccatactgtttgaaatgaggaaaacatgaaaccaacctgctgtcaagaggactaaaacccaatggcaaagcaaagagattttaataaatgttggttttaatcacagctacaaatatttgtaaacaataaggttctgactaaatgaagtgaaaagaaaagatttccagcatagggattatgcacacagagcatctctctgtatttatctgaccaaaatcaacatgacctaacccaaaaaggaatgtttatatcctattactggaaaggaatgaatccatcattttttgttaaattgtaatttaagaggtgagctacatgtgaggtttaagaagttctaaaatacccatttatatctcttcttttctggcagatactaactattcaattgactgacaagactatcaacctggaaaagttaactgaggttacttggattgatggtggtcctgtacttcctactccaactaagacaagtaccatcccaatgagttctcatccttctccatctactaccaatgccaccagttctgagacaatcaccagttctgccagtgcaaatactaccactggcactactgatactgttcctatcacaaccacatctttcccaagtactactagtgttacaactaatactactgttcctgatacaacttctcctttccctacaagtactactaatgctagcactaatgctactgttcctatcacaaccacacctttcccaacaagtactattggtgttacaactaatgctactgttcccaatacaactgcccctttcccaacaaatgctagtactgctagcactaatgctactgttcctatcacaaccacatgttttgcaacaagtactattggtgttacaactaatgctactgttcccgatacaactgcccctttcccaacaaatactactactgctagcactaatgctactattcctatcacaaccacaccttttgcaacaagtactattagtgttacaactagtactactgttcctgatacaactgctcctttccctacaagtactactagtgctagcactaatgctacccctgttcctatcacaaccacactttttgcaacaagtactattggtgttacaactggtactactgttcctgatacaactgctcctttccctacaagtactactagtactagcactagtgctactgttcctattacaaccacaccttcccctacaaatactgctgatgctaacactagtaatactgttcctaataccactatgccttctcctacaagtagtactactgtgagtactattgctaccgttcccatttcagtgactccttctctgacaagtactgctgatgccaccattagtactactgtacttattgccactacttcttctctaacaggtactactgatgttagcactagtactactattaataatataagtactcctgttcaaacaaatactactaatgctagcactagtactaatgttgctaatataactgctacctctcatacaagtactgatgatactgttcctaataatactgttccagttacagctattccttctcttgcaaatactggtgttgacactactagcaacagtttttccattatgaccacttctttctctgaaagtactaatgctatgaacactactgttattatggcaactacttctcctacaagtactgatgttgctagcacaaataatgatgcttctatgacaaattttcttttagctacaatgtctgctggtaatataactagtaatagtatttccataacaactacttcttttggtaatagtgttccttttgtgactactccttctccaagtactgatgctactactacaagtaataatactaatcctggcatgactacttattaccagacttctcctaccattcctacccatactcttacttctattcctagctctattacttctattttgagcatgtttccaacaagtaatacattcactactgataaaattactaattttactacccctacaaatgcaaacaccattattttcaacactcttgatacaaaaagtaccatggtaatagatgctacggtcactactaccagcaccaaagataataccatgagtccagatacaacagttacttccatagacaaattcaccacacacatcacacagttcgctactccccattctgctactactacaacactggccttaagccacacctcattagctcctacaaatctttctaatctaggcaccatggatattactgatgcagataactccagcagtgttacaggtaacacgacacacatttctgtttcaaatctcacaacagcctcagtcacaataacagccactggtctagattcacaaactccccatatggtaataaattctgtggctacttatttacctattactgcaactagtgctaccacagatactacaaatattacaaaatatgctttaaatactaccactcctgatagtacagtacatacctctgctactgcacctacttatattgcaaatgccataaatgctactcaagttccatgattactactcaaggcaggatagttacctcagataacgcctacaaacaactattacagatatagaaaatcagttacgagacactctatctatcttatgctacttaagttttcacggatattagtactctagccataaaagacacagctactccaaacactctcgtcattgcagacatgtttaggaaggtttacaaaccttataggtttcaccaaagaagctgtgggtacttattttgcaaccatagtatgtgctcttattcttttaaattatagttattactcctataacctcatcagttaaactacagatgttttatatatcctatatatccttgctacagatttcacaggtaattttggtatctcagataacaccacattaggctctgtaaatactattgccttagatttagttactgaaatagcccaacttgtttcttgggtcacatgacgtaccataactgagagtactggtgatacccccagcactcaaatggtttctataccaacagttattgatattacaggagagtatgtaattagtaatgctaaaaaaatgcactttattatcctatggacttttccaaatgccatagctaccaatagagtcatttgcattacacatactaatagtattatttcttctgaggagatcctagctgtagctacagatatagaaaattctaccattgaagatcttgtataaccttacttcagccactgaaataatttaaattataaatattacatgtgggtttgactatcacagaaaataaaatgattatagatcctaaaaacataaattcctgaactttgcaaccattaattcataggtactactaatactcttactacagattttataagtacttccacttatagacagaagagcattctcagaaaattagaattaatctaaattatgagatagtcttaaagcctcactgttaccaccaatgactggctctgactctagtataaatcagaaattatccagacagaggtgagaatgtaaatatacagcatgaggaagacagcctccacattggaatcagagttcataatcttatttgcattttcttctattaatacaagcttttcccttataatttcactgttcagactccccttcattgtgttagggttttcagtctattcctggtttttcatatccaaattcatcatccatccttgatccattgttttcttagatcactcaaacccccatgagtagacccatggtcattaccaaatctggtcatttgggtactattgtaggtttaaccctagggcaatattctcgaagtttagttcagggatccatggggttccccaagactttctggagcacacagcttcttcaaatctactttcataatgatgctaagttatttgttttttcagtctcattgtctcattagtatatagtggcactgtccagatgctctatgctgtattgtgtcataaaagatgaatatagaaaaagaaaaaagaatctagctgtattctattaagctagacattaaacagatttacaaaatgtaaaataatgtcattcttctaatttttttttgctttgggaaatacagttatttttcattaaaaacatatttatgttatcacaaagtgaatatgttattttttatgaatgaaaaataaatatttaaaaaatattttacaaatgactcaattttgatttctaatgcagtaaatattagcagatataacccacataaataaagcacagtgccctcaccaattttgaatgtaaaggggttctgagactaaagagtttgagaacaacttcctttaagtgggcagaaacatcgtatttccactctcatgtcctggtcaagtatattatcaacttccccagcatgtaggtactccagcatctgtggcttactcaacatgaatatctttccactgtctacaaacacatctacccagctttttgatctgtcagcccagctgtactattgtccagacaatttgatggtactccagatgaggggcacagattcatcagtcagcaacatttgcttttggaatctgcccacaagctacagtcctctgaacaaagttgatagaccttattcttgtgtatacatgactcttgaccttcccaactcaaaacaaaactcaaaattctatgggcttggtcagactccctcacttgtatctttactgagggagacttagtgcatttgtcttcttggcatcacaaactctgatacaggacaaagtgctctgtgtgatagggcaccatgagattctgctgccaggccaccatacattgctcattcactgaccaacaacttcattaaagcagctgggatttggaaaactgaagatgaatctgcttgaacaagcatagttctgaagccaccaaagtccaacctcttaagtacgtaaatggaacataattgaaagcatggaattttgaaaaggtaagaaatactttgaatatacaaaagtcttgactttggtcagatgtttgaaaagacttgagaattgaaactcaggagtcaatgcacaagtagtggtcctggaaccaggttcagaaaacatgagggcaatgttgacatgctaattctaccattgacaacactagcaaaacctgtgcatggactctgatttataaggtctagagaaacttctaagctccataatgactggccccgctgggtcacccacatgtgtgatattaattctgcactaatgattataacttatgttctaagtataaagaaatttacttttctacacttctggtacttgacacattcctacctttaccattactgtggacatcattatttttacacctaaaatttctagttattaatttaaacttcagtttctagtattccaagcatcgctatgtaaacactattcatgttgactatttaagagatgtcacacatactgcatgattaattttccagtgaggaatatagatgacagatgttttggattaacaggaaactcactgggagtctaaaggtatttaggaatacttcaaggagtaagggaagctgggaggtaccctgtagcacaaaaaagagtcaagaaaagctttcaggtggggaatgcactggacaaagagactgactttacatggtgtgattaggagatataaaatagtccactcttttctacagcaggagcattgtgagaagagacaagatttaaagtttatcaagttccatcaccaaacttccgtgtatatgagattagacattcaaatgagggttgaaagagcattcataccagtaaaggaacttacagggctagagaatgctttggtttccacatccctttccccatgggagagtggagtggtgctctgtgtgaagggcactgcagaagaagtgctcgatggagattaagagtgcctgtgaggagctgggactggcatctcactcccagctgggcactcgctgaactgagaaactcttgcctctcttccccatcagatgatacagtggagcatggagcatgggcaaggtttcagaaacctcatcatgcatctcccagagtgtggaagccaatgaaatcacaaagaatggcgctagagtcttgcccagagaattccaaaagtggcagagattggagaccctgcagtagtggatgcagagccagggaagtagtggtgcatcctggactcaacagtgttcaatggacaaggaagctgaagctcctcaggtgggtgtggggagatggctgggctagggctgtcatgaagcaatctgtccagtggagaagggactctagtgatgagaggtcgtggatggacttccaagagtggaaactaagtttgtagtggggagaggtcaaaataggtcatgcagattgcatctcacctcatgttagatgctgcacaaggggcctctgaaaaactcactaatgtgcccatgggaagaaatcagcactggggtcctctcacactgagggtacctgcggatgccttgccatagcatccatcacatgggaacctttgtcttttcctttaatttccatctggctgtgaaggatacccagaaacagtcaaggaagaggagaaggagaatatggaagtgtaaaagcatagaccgtaatccccttcctcactgctggaggtggtctctgcggaaggagaaaacttgacatggatgtgaaaatgacataccgatttagatgatacaaattcttgaaaacttccaaatgaccagaaagtgatgaggtctgttgacgggataagaaaagaatttcaactcagcattgaggaagaggggctaagattaagaaaaaatgaaaagcttgagaatgctgaaaagacacacactgcctcatttcacattgctcttacctgttagaatgatgggtgaacattcatccttaactttgtaatgctttataaatctcttattccaaggaaaagtggagaatggcttggagtacaaaagttagatctgggccccaaaggacgtttgaggttttctcaccttagccaatctctggtggcttcagagaaggtggctttggaaattttttactatgtaattgagaaaagtttggctcaagagaagaagtaaaggggtctgtacaacctatgggtcttgttacttaaaaacaacttcttatatttgcacaataatccatagtttgcaaagggcctcacataaatgttttattttgttccactcctgctgtgaggcagagagggaagaaatctttacactttttttctcagaggcagaaaggaagacttagaaaggttaaatgacttcttcaagaacacagagtcttaaaacatagtagagcttggccttctgattcacttcctattacccgtctgcttcagggtcccatctcctgaggaaagtccatctttgccatgatgtgatgaactaaaataaaataaacaaaaacccacttctagaaccaaataagtcttgtaaaagagtcctgatattattcctatctatttacgtgacctggatcaacttgcttgaattatctgagccttatttaattccttcattggtaaaatggaaggattgagagagtgcctaggaaaatatctagtgtagcaagaacccataatttggtattctttttggcatatcaaaacatcttgtaaccttgaatatatacaattttcatttgtcaattatacctcaataaagctggaagaaaaaaaaagagctgactactctattccttactgctaatacaccaagatgatacgtctggcttcctaggtcctctctcccaaattcttccctttttgataataattttaaaatgaacaataaatagataagttgtggtgaggttgccaatgtgttagaaacattgagtggaacttacgaaaaggaaccccttatgaaagttgtaagattcaaaatggagtcacttgtgccaaaccctggcaaaatagagttggggaaggtcctgaagagagggctctcacacaatttgtctgataacaggaactatcacaggacatttttccaaactgcagctttttacatgagtcacgccaagacagctagctgcctacacaagaatacttgcctgacacactgtctcacaaacctaatccctgcaagggagctacagtaacttccaggttacaaatcccacctagcaactatagactgttgccaatcacaactcgccagctcttgtaagacactgctagtgccaatgaactttctttcaaaacgacttgcataaccttctctttccccaataaaactctaatgtttttctttgttctctggatatagcagaggccaccctgttgtgcctgtatcccaaattgcagttctgttttcacattttaattccaaataaaagttctgtgctttgggaacatctctacattttttcttggaagttgacaccctttaactctgcctttgctttccttcttaccctcttttgctgggtggaaatgtggagtcagacagtagcaatagtgagttggctctagatgcccacaacaccttggagggggagctggagagcagctctgcatgcagaaagtaggtgtgggcggagtagctctgtcatgtgcctccacacaggagtgaagcttgacatggaacatggtcaccatatgccatttgcgcctccctctaattcaatgacttctcaaaaaaaccaccattttaatatatttattattcatttttaaatttccttttacttaaattactaatgcattggcagtttttgtagatgaagattcttatttattgactgtctacaaaaataaaattgtaatctttcttaataagaggaaaacccaaatttttgagggtgagctatgcaaagagcctcttcagggtgcatgtgtttggacatagaggtcgcagtagagggagaattgacagaccttgtggtcctaaatcttcccctgggaggttaattgctccttagtggtcacttactgataaatggcacctccatatgctgacatcaggcagaagtggagtgctgatgcaggacaggcaagcccccaaattggggctcagccagacagggttcttggctttccccaggaaagaattcaagggcaagtaggtggtgctaaacagaaacttttactgaagtggcagtgcatagcagcagcagaggcagtgcttcctgtggaacagggctatgctgtaggcagtgcacccagagtagcagctcagaggcagttctgcagcctcattaatacctacttttaatcacatgtaaattaaggagcaggttattcagaaatttctagaaaaggggtggtaacttccaggtcattgtcatggaaagggttgtaacttctggctgttaccatggcaatgccatggcaatggtaaactgggaagaggtcgagtgacatggcattggtggatgtgtctcagggagagatgcttttgcctcttcactatttcagctagtcttcaaactggtctggagttcaagccttacctcagtgctgcttccaatactctgtccaatactgattgttatctttctcttattttagagtgcagttgagataaggtggaaccactgaatgttttaggaaagcatactagacaggaaacaagagtataagaattatgatcattttctctgtaaggtaaaatccatcctttcttcctgagttctcagagaaaggatgtctgagctatgtctgcctgtgaattagtccatttttctctttcttaggtcctaactttcttcttcctttccagagggcagtcccaacaagacgacaattagttatttgaataaaagggcagtttcttaaatctactaaagatttaatctactaaatttaatctactgaagaccctgtgctaaacattttaattctataggcatgtgaaatgacagaaaaacaaaactgttgttcagagagttaagcaactggtctgatactgtttatcaggttaagtgttggagaaacgattacaatgagatctgcctgcctgtaaatagcattataatttcaaacttcccctgaggaagaaccttggggttcctaaaagctgctttaggatgagggaaggtcaaactcttccttcccagttgtatcagaattgctttgttttttgtgttttctcttctgtatttttgcataagattttatttgaagaaagggcatcattgcttaaaaaaattgaggaaaaccaattctgaacaatgccatactttcgataatttctgctgtatgagttagacagtattttgtgggctagctcaggaacctaaccaacatgcattctaagtaggaagcatattacctataaatcagctatcagaacacaatctccatgtaatctaaatactttatgtcaggatacaaagatggccaaattgaagaaatccttaaagcaaatgttgggagatgaggagaagtgaatgaaagtctcttcctcatgatggcgggagatacctggttctcaggagagggaagactacagagcttgtctgggacttaggctgccttggcctctaggacttgccccatctgttgtgcaaaggatagactgaagaaacagctctactgtttttgaataacctctttactacgacctgttactctcctgtcatggcaacccagagaagcatgggatttttttttccattacatgatgttttccatttaatgggattataatatgaactatgcatttaaaggtagtattctccattttttccaagtctttgtttttttatttttattcatttatttaaaaatacaatttcaatttcattttagattcagggtgtgcatgtgcaggcttgttaccttcgtatatcatgtgatgctgaggtttggtgtatgactgatcccaccacacaagtagtgagcatagtacccaacagttttccaaatctcatccccctccttccctccccactctagcagtccccattgtttgttgttgccatctttaggcccatgaatagctaatgtttagctcccacttataagtgtgaacatgtggcatttgcttttctgttcctgcattaatttgtttagaattattgccaccagcttcatccatgctgctgcagaggacatgattacatcctttttatggcttagtattccacggtgtatatgtaccaattttctttataacaaggaatttttgaacttgtcatttgtggttgtgtagggaattaatcacattgtatggggaatgatgtcttaggcaaaagtcagcttgatagctatcatttacattattttgtggcattgtactaaatgtattacatgtgttatctaagtaaatatgctgaatacaagtccaggaatcttttcacttgattggacttggcttttacggaattttcccagacataagggaaaactttgtggcatagcatttaataatttctggctctgccatcagatgacaagggttcaaatctcacctctgctacttaggaacttgccatcttgtgataattatttaacttatataagcttcaatgtcctcatttataagatggaaataatgtagtatttctttatatttctagtagtactttttgttttttttgatacagagtttcgctctgtcacccaggctagagtgcagtggcaccatctcggctcactgtagcctctgtctccaaggttcaagcgcttctcctgcctcagcctcccgagtaactgggattacaggcatgcgccacacatccaactaatttttgtatttttagtagagatggggtttcaccaggttggacaggctggtctcgaactcctgacctcagatgatctgcctgcctcggcctcccaaagtgctgggattacaggcatgagccgccgcgcccggccagcagcttgctacttctgagtcctgagttcagctggctcagacgccagatcccaatacatatagcagactccattggacctgcactaagagcaccacctgtaggggctgttgcttcaggtggacactttttttcctttcttgcctcagttcccacatctggaggatgaggcaaacatctgaactacaataaagtacatggaaatgcattttcagtctgtaaaatgctgcacaaaggtttactattatttattattgttattctataattccctgagtgttctgatgtctattgcgggttgttttttaagttttgtttttgtttttgttttttttgtcttcctttttcttccccttggatcttctggaagcagagaagtttctctttagtgctggtgaaacaggagagttccctgattcccccctgcaggacatgtgacaagggtgtggcctgcttggtcgccctgcagctcagccccctgtagggggagcatgcagacaggcaggcgtggaggccagcatgagcgcttctgggctccggccccagggcagtgtctagggaccggtgtctgagactcccgaagcccaagtggacgtgtcttactaagctcttttagatattctgtctgcagatggcttgtgtgttaatcagcttagtggatcctctgccttatcccaagggcagtgggccagagtgacaaccttctgcatcccaagtccttgcccagtgtattggaagaatcagatcacatgtgggctcgaaggatgagtgcaagattttattgagtggtggaggtaaacgttttctctgtttcagtcagtcaacaaccgcatgtaattacttaattttaatacaaaactaggatcagagggtaggagctgcggtgtgaagagaactaagagccccttcaaatatatgggaatctaggttttctggagagctaggtactctgctaaaaagaaataaggaagaaataagaataagagatgaggaaggggggctgtgaccacaagagataaataagattatctctagccaatgactctcccatagtcagaggacgcctaaaagcagagttgaatgttgactctcagtctgctgaatacaaatccagggatcttttcacttgattggacttgatttttatggaattttcccaggcataagggaaaactctgtggcatagcatctcatgagatgaatggggagccagagaggggggatggagagggaaggtggtcttcccctgagttgggccacccatgggtgggagaaagactctcctccaaccgcccccagctgaactcccctagggatccagacctccttcttctctctttctctgcctcttgttctgtcattgctgttctgctggttccaacattcagcagcttgcttgcatgtgcccactaaggtctacggtttatatgggggcaggatggggggcatggcgggccaaaaggcaatttttagggtacaaaaacagaattgcctgtcctcacttagggccatgggtcttcagacttgagggtggggccttttccagggaaccaccctcttctacccagaatttccccctcctgtctgtatcactggtgctttataataaggctgctctgagtccttttttcaaattgaagttttgtgagggaaagctatctccagaggtgtctctagtgtgtctcaaactgtgattctgggtaaaattggctcttatttgagctggaagaaaatgtttcactgctaaattaaataatgctcatctttcctcactttataaaatagttaatggatacagttatcccaattttatgttatttttcaatgattttttttcttaaacctcttatgtttgctgctatttatttgttgccttgtagaagctctagctaagcacaaaatgtatgaacaaataacaggcgggaaagattttgaaacagtcagtagggtttctattgactgtattggtgtggttgaccattactttatatggcaaaactcacattttatacaagtaaaattttctttggtttgtgtgattaaattgaacatagtgtttcatcatgttctttttttttgagacagagtctcgctctgttgcccaggcaggagtgcagtggtgcaatctcagctcactgaaacctctgcctcccgggttcaagcaattctcctgcctcggcctcctgagtagctaggattacaggcatggctaatttttgtgtttttactagagacggggtttcaccatgttggtcaggctggtctcgaactcctgaccttgcaatccacctgccttggcctcccagagtgctgggattacaggcgagtaatcctgtatgattataccgccaccattcccggccatcatattcttctaagaacactgttatttgatggtgatccacagaataaatgtgaacattattgctgagagagactttggcttgtctcctgctctggcagtgagatgttgagttttacagtgtttttccaaagcagacttgtgtccagcctcagctgaggtgtacacaggatgctaattgtccctcaacttgtctgcacatcgttctacttatactcacttatgttttgtcaaaatatgatattaatattaaaatatttgttgaaataagttacaaacattttataatctatacaaataattcacatttgaagtagaatattattaagatataacatcttggtatttttcaatgtattctatttaacattcaatttttaatattcaaattattatcattcactactcaatctaaccccgtttataaagttgtataattttacaactgcagggaatattatggatgactttatacaactacttaattttactgctgtggaaagtgaggttcatagtgattaaatgattaagcaatttgcaaaagtattatggctttgtagtttattgatctttccaccacatggtccccagctctgtttaaaaatatttctgagaacttaaagaagtcagctcctcctctgcaccaggcactgacctgttgccaagagactcttgtccaagccaagtagtggtggccaagagagtcttgtccttggagaatatacattctattagggtaggctatcaataaataggtgaacaattgcataatgatgagatttcaggactctgctgccagtgtgaatgtgtgcatggacactggctacccacacctccccttcactttgccatggccaccagtgtgatcatgcacacagagggcagcaggccctgccacaggtgcaaatgcaagcacagacctcggcaaccctgtccccacctatgactcactgctggcatgagcatgtgcaggaatgtcacagccccgcttctgccagtatccccctgccccagccaacatgcatgcatcctgctgtgctgtgccacggctgccagcacaacccgtcggagtgttgtggccagtggaccaggaatacctcggccccctcagcacagtaggttcctagccttgaggggccagagaagaaagctggggtcctggaaccagctccccagggttagagcacacagctcaggagtgctaagctgagtcttgggacccaaaaatcttccagaaacaaccccagggaactgaacccaccttataccacagtcaaacccccaagggcatcaaagaaaataaaagcaagtaaacaaacaaaaaatcatccaaagtatagtgccttcaaagattgaagaaacatcagcccacacagtgagaaagaaccagtgcaagacgtctggcaactcaaaaagccagagtgtcttcttacctgcaaataactgcactagttcctcagtaatggtttttcgctaggctgaaatggctgaaatgtcagaaatagaattcagaatatgattaggaatgaagaacatcaatatccaggaggaagttgaaacccaatccaaggaatctaaggtatccaataaaacaatataggagataaaagacaaaatggccatgtaaagaaataaccaaactgatctgatagagctgaaaaactcgctttgagaattgcagaataccatcacaagtactaacagcagaactgaccaagctgaggaaagagtctcagagcttgaagaatggatctccaaaatagtcagaaaaaaaggaaaaacaataaagaagagtgaacaaatcctccaagaattatgggattatataaaatatgaaatctatgactcactggtgtccctggaagagaaggagaaaaagcaagcaacttggaaagcatattgagaatattgtccatgaaaatttccccaacctcactagacaggccaacattcaaattcaggaaatgcggagaacctctgtgagatattacacaagacaacaattcccaagacacataatcatcagattctccaacgtcgaaatggaagaaaaaatgttaaaggcagctacagagaagtgacaggtaatctaccaagggaaacccatcatgctaagagcagacatttcagcagaaactctacaaaccagaagatactgggggcctatagtcaagaactcttaaagaaaagaaattccaaccaaggatttcatatccagcaaaactaagctttgtatgcaagggagaaataagttccttttcagacaagcaaatgctaaggaaattacttaccaccagactgccttacaagaggtccttagggaagcgccaaatacagaaaggaaagaccattactggccaagaagaagacttaactatctaaagtatatatacactcaacattgaagcacccagattcataaaacaactacttgcttaatgatttattctttctatgaagcacatgatgatgccatcagctgtgaatcagagatgtagggaggtggttgttggaagcttgagaaagaaggtgaaacagccatcctggaaagcagaaacattaaaagacaagggacctacttacacaaggatcaaaagctgtgttgtaagacagtttgtcacaaacgcacgagtgctgtttcttctgcaacagtcagctacatgggtacaactgaaggaaaaaaaggtaggtagaaaatttggccagaattgagatattactatgcaaatatgacagaaagagagagggagttaataaaggtaagagtgtttgtaaggaagcagttatagttctggcccatggaatctggcctgggaaagaagggaagttagtacaataaaagactgagttcaagaaactgagaggctggtatgctggacagaaccactctgtgaatatcgatatttccaaaaagacacaggaggagtggtggaagaagagacagttgattgtagtcatcaagggatgaatggtgtgacttgcagaggacattggatgacagcagcaagcagctgtgttcttagtacaagcttttcaaaggagctcgggtttgagagaaggagagaaattggagaggggagcagggaggatgtcaatctacctccacttcttacaaagagatggtagaaactttcagagagtttgttgctttctaaaggtcttttattgtggaggggtttgagagaaggtgtgggatggggttagactggggctgtgcagagcagtgtgaggatgagggccttatgatggtgagttaccccagaggattatattgtggatggtgatttagtatatggggtagtgagcaagataggaatggtactctggttggagagtaagcagtgatttcccatggcttgagggttttctagatcacattaggcagaggaaaacctcagaaaaggtgatttcaatccagttgagggttgatttatttgaggaaaagatgcttaaagatctccaggggattactttcacccaatactagatgttttaccatgtgatcattacaagagtaatacaagctattctaatttcagattagactagacattatatttttctttctggcagattataatttatgattacaacaattcctgtgacctgtatgaagacacatatttctaatttcagcttgagagaaatttagtcttttattggatgatttaagtagatgattagtcagagggaaaattggtaatatagaggacagagtgtattataagatgcaacagaaacttttctccaatatatgcccagataaaagtacaccagagtaggaacagagtttagggcatatgtggtttaaaatttccacccataaaagagtttcgtccacaccacatctttccaatctcatcagcatgtgatttatacatcctcaaaaggttgcccattaaatttttgctcattacttattttaaaaacgtttttgtcggtactgagataaattctggcttcccagaggtctacctataagctttaatttttcatgttaaaccatctctctgatactgtttcgctttttagataatggctactattttcttaccagtcatccagattaaaactccttattcctctaaaacatctgtctcatgacatgtagctaaaaaagaatatatataatatatatatttatttgaattctaccatcttgtggttatttaagtagttgtctataaaatcctatatatgtattttgcagccttaagccatgcatgttattactcgttatgccagacagcttgacagctgaaattagtccaagggtccagggctctactatagcttggagatgggaagttctctgctcagagtgaaaattggtcaggaatgcttgcttgggaaaacgtgcaggtgttgtttagaaacaacatttttctaattttttttccaggttactctttctctcccttgtttccattttttctgatttccacatttttaatactgtttttatatagatcctgtgctggtttctttgctttaattaatatttcattttcaaataagctcaaacttggagaaaagttgcaagtatagtaacaaattccagtattctctttatccatttttcccagttatctcctgtaaattacaaattgttcactatatttactttatcacttttctctttttctctcctcctttcccccctctctatctcacaaacattcgacagtttgtatacaatgtgtttcgttatcacaaaaatactttagtatgtatttcctaaaaagacaagaacgtattctcacataactacaacatcatcatccaaaccaggaaattaacatgcatacactaccaccacacaatgcacagacaccaggcacatttcaccaattgcaccaataatgtccaatataggaagcacaaacaacagcaacacaaaagaaattagtctgcgagcacaattgcatgtcgcatttaattgtttcattgttttattttgcttgttttttactcccctctattctggaactattccttggtttctttttttctttcataattttgacatttgaagattactagtcagttatttgtagaatatccctcatacttgagggttacctaatatgtcctcgtgattgcactgaggttatgcatttttgagggaaataacacaggcacgatgttgagcccatctcagtgctccctatcaggagccacacaatgtccatctgtccattatcgctgatgttctgtggggttacttggttgaggtggtgtcttccaggtttctaaagctactattttgtctcaacataaataataaatatactgtgagaagatactttgaagttatgcagcatcccatttgttagttgtggcatccattgatgattcctgcctgaatcaattattactctcaaatttgctaaacagtgattttgtatctccttattccttttgcctttgttattttgcttgggaagaacttgtctttctttgctatttatttattgagtgatgtttggtaatagccacttcctgaggcctctaaacgtgccacttctctgagatcccacatattctcatgatctagcaactaaaattctaactacaggaaatcagggggcttccaggatttgtttccactgatgtccattttgactggtcagtgcctgtgctgtggcttaaatgtgtgatgttagaatgtgattcctgttccatccaggaagtagactggtgaagaacatttgaacttctaattcaggggtcctcagtcttaatagcatattggaaatgcctggagaattcaataacctacgaatgcctgggtggtagctcatcatcaggtgatactaatatgctgtcaagattgacagccactgggttagtgtagttgagagctttcctgttcattgtcagctaactaagtagtagcagggacttagatactgatggaaaccctagcaaacagggagaagaaactaaattattcgactcatgaaggtatggagagggagggaggaagagagaaagaggagaaggagaaggaggaggagaaataagagaaaaggaagagaaagagaaggagagagaaatggagccaaatgtaatcaatggttagatttgggtaaagaatatataagaattactgcccttctttatgaatttgaaattgtatcaaaatattcttaagccactaaagaccaaagtcacagtaaacattagcccatgggtcctcttgtcctcatagaaccacagagaaaagtaaaaataaggaatacatcttttatttatcctccacatttaatatgaagttgtgagtagaggaggtgaagaagaaaaagagttacattctcatagtcactaggagagaatctgacctcagaaacccctgaaggatgagagatgacagagaggcccaagtgacagagtgttcttagaggaagttggggtatctttcttttgcagcatgtaacgcagtcaggaaacttgcatccagaacatatgatctggagaggatcctgaagtcatcgaattcaagctcccaccgcctgtaggaatgtttaaagtactttcccagcggtattcatatgcactgtctgtctaatatgtatgtaatatgaatgcataccttttaactatagaagtgcattattctctgcaggttgacaaaaatgtagtccatttcttgaggcgactggaagaggaaacattaggtggcatggagtaaggctcagaaggggacagtgtgacctcaaggagagaatggctgctgaggggcttgtaggcatgtaactgcagctctgtaagggaagagaaatgcatgtctcatttcctatttatttcagtggcacctgtttttgacctgatgtcaagcacatagacggtgctcaatgaatatgttactgataactaaatgctgagaccagcaatagagagaaaaataaaggaggtagtgggtagggcttcctttcttcctcccccagtcctccccaaggtcccttccacacacacgaggtcctgtatttcaggatgactcactctgatgcctcctcccctagctcgtgggccacgtagataatgtcagggtaccccatgcagctggagatgttattttggggatagtagaagaggaagatgaggcacatctcattaatggtgctggggcctccctggaggaaacagacaaagatggagagacaaagatacaaaggcatgcagagacaggaggacaaagcaaacagaaaatagttgaagtggttatcttaccagtgatgccattctccttttcccttaaggtagagccagctcactgccctatttgctgctctattttcattggtggacaattattgatgttattccaaaaagcattccatatatctgccctgtcctcagcttcactgccactatcctgatttgggctagactatctgcctctcaactattgtcagtcactcatctgttctaattgcaatctgacctctgtagagctaccagacaagttgtttacaatttgtcttgcatcctgccatttgcctgttctgaaacctccagtggcttccagtcactggaatagtcagtcatcactaaaccaattatttgattctatctaataaattccaacccattcattcattccatttacttacctggcaaatatttatagagttagccctgctgtcctggagatataggtgggtcaggatcacccctgcttcaaggactgtttccaactttatctacctcatcctcattccattcctttagatatcttttgccaaccaaacttcttcatgtgcaccccacgctctccttatatatggctttctcagttttttccttctccagaattccccatctctatgtgtctaaagaaggactcattcacctacgtcacatgttcagttcactgtagtaggatctcatgattctttcctgtgaatttccctagtgggttattcccgttcttcttgtatggtatatatcacttactaacttgtgatataatcatttgtagggcggtattttttcctcagttgcctgcaacaccttttgaatcccacaagcactgaaccactcctgatgcacaaaacgggggattttcttgtgatcatagaaacaatagccaactttaattgagaatctactacaagtcaggcaatgatctaggtgttttgcatgtgttaaccaactcccacaacaatcttgtgaggtagaaagtagtattaatcttatgtgaattgggaaactgagatacaaaaaagtcaaataacttgtctaaagttagaaatgtactaaatgattgtgctgatattcaaacccaggcaatgaggccccagaatctctgctcttagtcgctatagcatactatatttccatggtcttggtgggttattggcagataatgtgagaaatccctgttcctatcttagatgcatggggtgtgagaacatgaaaagccccgtgtggatgtgtgatgccattggaggaaggaaggggcttcagtgaaatcacaggggtcactgggtagccaaagccatgagtgggctctccactggggctatggtcatggtgaccatggtggggtgagaggtcacttacaaatgtcatggagtcacggtccagtgtctggtagtgacattctaccagcaattcatctccctgttcagagtgaaacatgaaggctgagagtaagacacagagggactggtacagcttgagaactttcttggttgtcagtaatgaggtatgatgctgctgcccccaactctgcctggcctccctcagactctcaccggcttgatctccactctagagggcaaatctcgagtctcctgcaggttgaagtcataggaatcgtctttacagatttttcgaagttgtgttccattcctagaggaagagaagtcgggaattcagaaataaagagaagatgaaatacagaggggtctgccaataaagatgtagcatgcgggtggggtcattctgtgagtagattatccataaaaataaacaaaacacttcatcttccacagtcttatttcagttatttctactctaaagatagttctacctcttcctttttctcaaccggacataatcgtatgctacagaataaatcactattcttaaaattcattcccacctgcagaagggagagcttcaaggtcttccctcacctgtattgcactgcttgcagagcccgtccagccaagtgggtgtgcagcaggtagccatacacctgtatgtcaggcataggagctccattcatctgtaacagggaagaggtgcacccgatttgttaaggactgtgttcttgacctgctgcttgattttccccccttggtatttgacactttcctctgatgactgacatttaccactgtaattcttattgaacctttctgacccttcttccttctgcacttcccttgttctcaaagccctgactccttcccttccttgcaaaagtcatgttagtgaatctcctgagtaccaggctgtaattattctccaagtctggggttcaggctgtgtgggcttgtggatctgaccagatctgggatgggggacaaggagagtgtgtttcctcctcaggaagggtgcgcctcccagctccacctcctcaaacttctccgtcctacacagcccataggacatgaaggactcagcgcccggggggatgaagtggatgggaaacgtgaagaagcccagctggaggacatccgtgtcgtatttgcacagctgagaagtgtagtacacgcgaatccccgaggaatcatacacacctggtgcagagaggaacagtcaatcacaggaggcaggagagtgggtcacaatgtggagagaaagaggctcaggaaagctggggtggggctttgaccacagggagtcagcacacatcccacaatgcgttcccaataccgaaaaaaacagccagccccaccagcttcccttccttaaatcctctggatgctcaccaggaaggttgttaaaattgctgtaatgaatctccagtcagatccactgagggtccaagggggtcccaatagagacgcctacgtcatctggaaactggtagctctgttggaaggagttagatttggcagcaagaagggctgggaaccagccatagggattcagggctcctggccttgttttctaattgtcatcccagacttcccctatcccctggtcttccaccagcccagtgatctcattacccaaccacatgcacccgcttagccatgtgtttaccccatcacgggactcactgtgcccccgacagccgagcccacgatgacctgtgagcaaagggagaaggcagggtcggccccatagcagtcgctgatgcctgtggggagaacgctagcattgccacaggcgtacaccaggatgtgatgcaccgttgtctcattgtggtagaccaacttaggctcaaactgggcagaaaaggagagcagagcatgatcaagaccttctacatcaaatccatattatcttccttcctgtcaaaactatacccatttccgtcttctctctgtttctctctctccctttttctctgtttttgttccccaagctaccattttcccacccagtcagtttgactctcctctcaactcccccctcctttaagccccttctggagagcagacatgaaatctagccagggacattctgccttcccttagtaacctcctcagttcactgtatctgagcatgtagccatgccttttcaaattatctgtctaaagaaaaaaagtctccacatttgccacatattgtgagatcatacctttatttatttgatcaaaattgaaatcactcaaatatgaaattgggttaccaagtttgagttcattctagctagacttctccaacctcctgacagcccctggccatatcctctccctgcctttacctcctcttgggctaagagagcacaattctggggccaggttgaggctcatactttgttctttgcaaacaattattaattcttaaccttcatcaacatgtctgttgcattgtggggcttaaataaaatagcgctgggagttacatttctgggctcaggaaatgatgtagctgcgacctctaccaagccctgcctgtccccctgttcttgcaactacttccttcttgcttcctccaagaaattttccagacctcatcctccagggttgaccacaccccctgctctgctccagcacccttccctgccttgacaatgtcccccatctggtccaccataccttgtaaatgtgatgcttctcgctcacaatagggagaggaagaaaggtgcaggcatacgtggtgtcatcctctggaatgaggaactgtggaagggtgcacagaagctgagccagatgacagtgaggctctgaaaaagtagggcaagggccaggccagggaagggggttcacattagggtcagattggcagtccttaggagacagagaagagtcagagtaatctccacccaagggatatactgaatactgggggcaagagaagggatctgggttgagtggggtgaggagaagggagctggaggctgctgggtgggatgaaggtgtcttacattagtgatctccaagtcatggatgatggtgtcctcagggacatccagatcgtcagggtggacgacttgtagcagaaagatggacttgacaaaagtacgctcccgatacagcttcagagtgtcatccaggccataggcggccagcaccctcacggtgttgctctgcggggtgccataagcattgaggagctgccacccctgagcagcactctgcatatccctgcacccaaggacctacacaaggcacttgctcatgtctacatggtggaatggaaggaacttcacactgggagtgagaactagttaagttctatttctgcctccgaggctcacttgctggtgatcttgagcaagtcacactccctctcgcatgccctctctaagcttgtgtccacatctgtaaaatgaaaggactgaattaaactcttatatcctaacactctaaaggtcagcgaaactgggcagaattcttcaaaaggagaaccctggggcaggtgggcaggaggtgaatcagtgggaggtcaccctgcggaaggcttgtggatttcagcaggtggcacaattggagcatttcctgggaaggctgagaggaatagaagtcctgggaatgatgactagctgcctgactgggggcaactacctctccagaaggaaaacctgcttgtgaattaaatgcttttctctgctctctattttaccgtaatatccaggtcatgagggtcgcaggagcggaagggcctggaaaagtgcatggtggtgtagacagcatcttccgtcaggcccagcagctcagcatcctggctcccatcctccttcagagtgtcttcctccaccaagtgctgatccttgggtccagtgaaggtcaagaagtaagaactaggagcttcaaatgtcatgctttggagcagtagctgttcctttagctcccctaggatactagagtagcagagcccaggtgttctttattatgtagtttttctccttgggcaaagcatggcatgaagaacatggcagagcacacttttatggataatggagtttcaccacctgtccttgctttacttctcccatttcaaatctcatgtccataaagtctaatattcctgcatccctaatacttgaagtctcacatattatctgaagtatgtatgacattcattctctcatgtggctcttcatgtaactatttctcagacagctttgaattttccccagtgacctgcagttagtgggctttagcaagtaagtggtgcaagactatctcacaatctaatggtttcattctctcagcagtctttagagacttgcagtctggaagacatagatttcaaactctacaatggaccatttctggagggacacaccagcattcagctggcattctgggagtgtgtttagatatcctcggggaatgtgaatcctttctggacagaaaccatcctcaacccaacaaagaccctcatccttggaagcaagtcaccctcacacttaccgagaaatagacattgccattaggcaagactcctccaacaaccagatcacttcccacgttggtgtagcgatttgtgacaccgaagcccacccagccagctgtacggacctggagctcaaaactgatgatttcagcctcaaggtcaaagtcccaacgcaggaaaatgacattagaaggatctaggaacctggaatagcgcaggcgagatgtggggccaaggcggttgctttgtaaggggactcccagggccaaaagtggaaaaagcctgaagagaaggtcatgggccatggctcctgggacctggagcatctcccttgcagatgaacattcgagagcttcagagttttatgtcctacctgggccaggcaccatgccatgggggagggccaggctggggcacttctgatctgattatcctccgggttcagagcgatgccccttacataactctggaggtgagagatgcccagagaggatacagggcaggttgctttcactctgaagcaggggcctggcagaaaattcttaggattgaatcatttagactttccaccctgaccccatgccagcgtcctgccagtggggaccctgcagaatcaagaaagtttagtttctttttctccccctcccttcctgcccacctcttccatcttctatcctgggatgtctttacaggacattctgcctctggactatgcccccaccccactttttgtgggcatttcccattttgtctatgtatagaacttcggtactagcaaggatgtgggactgcttgtaaacctagtctttcaatttcccagtgcagtgcaggaaggagggaagtagctggcaaggaccggagggaaggctgcaatttccatctgctagaggaggctttgctactaatccctagaaggacactgagaggagggatatcagcttctcagatggttgagtcgggcagctttggttttctgcacactcctggggaggagcaggaagagggaggaggtgaggggaagaagatgagaaataaacatgagtttgcctttgggatgctttgtgctttcccttccggccatcaattacctttcagagaaattaacttaatggctgcatggcaggctgagcttgcccgattgagcacattagtattatgcaaacaatggaagcaacacagaaggaaggttagaatattagaacaccagaatagaaaagaactttagagccacttagttttccaaaaatttctatctccttaatttctagatgatgaaatgggagctccaaagggtaacaagagtggtgcttgatgccccgttgagtcaatggtgggtcatggtccctgaccataatttccttaggtcacagacaccctacaggtaccagacccctgccatgcatttccacatggcttgtcctggtggaagaatctagtgacatttgttggctgtttcttagggaagaaaccaaagtctgactctaactccacagtattttccccctggtgactgacacagctgacctagagctagaagtcaactcatctgacccctggttgctggctctccatttgacaatggagaggacatggaccctgagggcctctcccacacagactgggcctcacctctccacagaggaattcagctcaggagtagatgtacagatgccggcacgatctgcttacagcttctcattgcaggcatagtctttttttttttttttttttttggctactgagctcatcaaagctggtgaggacccagctaaggttgtttgctgctgctgtgagctcttgagtagtaattggggtgtggtgagggagaaaacaaatgcctcaagggggcagccacagcccctaactctaggcctgacagagaaggcagggagctcggcagccatctggaagcaagaggcttatcttggcccaggaccagagctgagccaagagaagaggagaggtcggagcctgggaggcactgaccttgaggagcagtaacaccagagagagagagagataacaggtgcgtggagacattctgatcccaatctcacttaaggattaagggagggggcagtagggagacaggatagccagtcttgtaaattgagacaggcccaggatcccttatcctgcaatctgtcctgctggacagagcactgtcctcagcacagaggcaaggtcctcaataaagagctgggagcagtgactgcagactcagagggtctcttctcctggatccttatctggcttccaccccaggaagccaggccattgctacacctgtgtggggctctctagggagatggggctggggctggccctgcttcccttctgcatttatcaagtgcctgtgacagggaagacaccacaagagggtcaccgacccgagggcagtgcagtcccaggtcttgaaatagtgaagttcagtttctaaacccctctgtgcctccttctcgctctctgtaaaatgctgcggttggagagatggtggatacagggccttttaagttgaatttcccagatgattggtttccaagctttctgaaaaatgaggccccttatcaatgttgaaaaataggtaaatctcattcttttttatgactgaacttaaagaatgtgattggattgtttgtaacccaaagtataaaggcttttttttttttttctgagacaaggtctcagtctgtcacctaggctggattgcagtggcataatcacagctcactgcagccttgacctcccaggctcaggcgaccttcctgcctcagcctcctgaatagctgggattataggtgtgcatcactatgcctagttaatttttgtattttttgtagagacggggcttcatcatgttgcccaaatgcttgatgtgcttatttcacattccatgcctgtatcaaaacatctcatgtaccccatacatgtatatacctactatgtacgcataaaaatttttttaaataatttttaaaattaaaaaaattctgagaatttaagcttttaatctcagttgagtactaagtgaatggtaattaaagactaaaattactaccagttgtcatattttaattgaatttaaaatttaccattgcaatcatagaagtcaactcttattgaaagcttagtctgtgccaagctctattctaaaatgtattgaccctaaatacatttagataatgtatacattatctaaaatgtaataaaaaaataataatttttgttattatttccatcctatggatgaagctgctgaaacccaaggtcccactactgggtggtggcaacactatgagctgttgggaaaatataactaaatctattattaagtttaagtaaaataattgaatattatataattatatgaattaatcaaatataattaaatatatttcataaataaatattattagaaataattcaaggagaaaaaaaatcccccaacccagaaaacctctctacaaaggtagatgagaacaaaagtacttttaaaatctttttttttttttttttttgagatggagtcttacttgttgcccaggctggagtgcagtggtgtgatctcaactcactgcaacgtccacctcccgggttcaaacgattctcctctctcagcctcccgagtagctgggattacaattgcccaccatcacgcgtggctaatttttgtacttttagtagagatggggttttaccatattgatcaggctgttctcaaactccttaccttaggtgatccactcacatcggcctcccaaagtgctgggattacaggcgtgagccaccgcacctggcctcattttttttttttttctaacaaagagcatcctgaaatattgagctgcaaacataggtaagaaagctggaaacttgcatggggagatgcctgcagctacaccaaaagaaaaggtgtacctgggggccaggcatgtccaccatagaagcttcatcttcccttttttgttagcacatgtacagtaagaaagaaatgggcaacatggtgcagctcaggccagagggagtagctatttgtcctcactcaaaataacatattctgaatttggattttctttcccctgtcaccgttactgtcctagcatcacattccttggattctctgaatgccttattgcattccacacaaaaatgatgtattctccaacaaaggaggtcacctcacagtgctattggagtcttatggatagtgctaatgcttatggaatccagtggccttgccatgtttcaccacctaggatcagctggccttatacaatatcactacgacctattgaaatcttaggaccagctcaagttgggagacatctttagaggctaaggtgctcctctgaaaaatggtctccaaaccattttcctctccaaactaaaatttcagttaataaaatatgtgcaaatgaagctgtcacagttgcacttaataattcgcactcccaatttagcttctcaatactgcaagctaggcgttactgatttaggggttttagagccctggatagatgaagttttcctactagaacttctgcttcctgagggggttctcttcttccctagctgggctgaaagactccagtagtccacttgtagcagccacaggctgaactctctaaaatctgttcttgtttttgtttttttaaatactcagtcaactggccaaaaaaacacctctccacttaaaactatcaattaaaactctcagggggtaacagactgcagggtgaagtgaagagagaaggaaggaagagaggaaaatactatagagtgagaaagtggagttcctgggcaactagctttatataaaaggcaagtatgtactaggaaaatctgtcattgatttcccgtttatctgctgtgccataaacctcagttaacttttatagtaactcctcatgtctccagtaaacactcagaatcctgcaacatgaatgaccagaatccatcgatggcattgagagttgcatgggcaaggagaagctaagtgtaacacctccctctcacctttgccctcccctcccctctcacctttgcccttctatatagatccctctttattagacttccttttttcaatcagcatagtaatgtgccaaaatcacacattgtctaatttggtgcatgtagtaaagggttttgtaccccaaatggctgtggagtggcctttattttatgtcagttaccaattcgttagagagaacataattcccacttcataaacttcaattatctgaggaattttgggttttccatccttatctagacggcaagaagggttgttatgaataatcacagtgaagatatgtacaagtaaaactgctcaagcacccactctgtttagcagaattgagacaggtatgcatggggcaatgtgaggagttaatttatatttaattctaaaggtgaacgatggggacaagctgtgtcatatggtccacaactgccacagctcagttattttggattacattttcaatccagggtatatagtaaaaaattttggcatagatgccaacatcggctctcaaaacacatccatccgcaaaagacaggattccttgaagcatcccattgcagattgccggggcagcagaaacttcctgccaggaaaacaataataacaacaacaaaaaagcagattatctttctggcaagacagaaggaagaaaatgggaaaattaatggatgaagagtattttaccttgcagggctgcctccttcctggcacaatgcccacacacagcatattttccgtgatgttgtaggttttataggcatcgcgacactgaggcttggagattacagagatgttcacagtttgcagtgaatcgggctctttgtctaaagaaaagatagaagtcaaacttccttaagagttttgttaggtattaaaacttcttttaaaaaacttttcttcttctaccatcagaaattaaaagagatcaaacattcagagaagtcagaactgtggcagttaggacaacgagggtataggagatgatcagattaacaatttcttatgatgcagaatcggtgaccttataaaagtgatcaaattcttgggagttacatgtacatgtgagacactccaggaatgaaatgaaacactttgttttaaacttttctggaaatttggctgggcacagtgctcacgcctgtaatcccagcactttggtaggccaggatgggtggatcacctgaggtcaggagttcgagaccagcttggccaacatggtgaaaccctgtctctactaaaaatagaaaaattagctgggcgtggtgatgagtgcctgtaatgccagctacttgggaggcaggagaattgcttgaactcaagaagcggaggttgctatgagccgagactgcgccactgcactccagcctgggtgacaagagtgagactccatctcaaaaaaacccaaaaacttttctggaaatttaaacattcaaagggtttcttttgagatgtaatttttagagtttgaatgaatttacagatatctggcctactttctcaattgtcaggtcaaaacaaaaccgagtatctgcacaaaaaagtcactgaaaaagcagttttcttaaacatataaagctagtaaatggtaaagctaagatttaaaactggatttcctggttcctaattaaagttcttttctttgtatcaatagtccacaaatactgtgaattgtgcacacttgtaacaaaatttgtccaatctgaaacaaaatgagaaaaacaacaaagtagtatgaacacatgtggcatgtgttctttccacggacgtttctttgggaagaagtactgtattttaagattttggtttttttaataatggaagagtatgtttaatgtttttatttgaaaataatgtattagttcttgaaaataaaatgtataagatccttcactttattttccaagcaataatttcatggctaaacatttcttttgggaatacttctgtaggaaatgcttacttaactacttgatgacccagatcaaaataagatgcattttttttgaagtcatatctcgttttgaaccttatgccataacccagatgaatcaaacatactgctcacagaaggacatttggctctttccaaaaatcaaattgactctcagaggacaaataatttctacttattgatatattcaagaaaatgtgctctaaatctgaaggtatttactaaggattagttttaaaaggcttgaatcatggcaacaatgatagaataagtgtacatctgcccattggtttctataaaaagaaagtagtgatggatagatgaatgtaatctgacaagtttgtttcaaataaatctccttttcatactatggtatctagtgtatgatgtatattatatatactcaaacttactcatgagtaaagttgcattaataattcttcacaagggattatatatcattgttctattttgctaataggtaatcaactccctttcaccactactctcaactctcgtaattagcaactatagacagttaattagggtttgcatagaaatttggagatggagtaatgggcagatggagatgcaacttagaaaacagaaagttgccttaagttgtgggtgttttatggaatatgaaacatgaggcctagaacaaagtttagatagactatctagttcaggagtttcaaattatgtatagaaaacttccattgataaaaataatggtagccctttgtcaattttctgaagaaatgagtgaatgcttagaatgttaccagtttaaaatgtttatttcagaagttctttttaaaactttaactctgtatctttattaaaatcttacataaggaagttctatcgcatttagtaaaatattatatatttatcttacatttaatacactgatatttatttcatgacttttcaaagcttcaagttgctttattgcctgaaatggtttgaaaatatacaacagagtaatctgctttattttagagttaaggaaattgaggctccaaggtaaaatgacctgctgtcacatagaaaattaggattggaatacaaatgttttctttccactaaaaccacttctatcatatatgaaagagaaaatgatagaaagatacagcgggtgaataaaaaaaacccaaaaaccttgaagcactccttcagtgaggtacagagaaaaggaaaggggggaaagaggttagaagaaagcttcactaggccgaattgaagaagccaagagtcgcgaaggtgtagaagcatgtctaattctgagagaagaacattgtcttgaactcacagatatcacacacattgtagctccaggtagagacagagcacatggtattttcagagatagtttggtagggcaggttggctaatttcacatagtcattgagttcagcctctgttttcagcttgattagcatgatgtcatgatcaatagaagtgactgagaagtgtggatgatgaatcatcttctcatagccaatcacttgcagatgcttttcattagagtctgctgggattgtaacccccaatatcacccgaagctttctggaacaatatagacgtttatgagaggacttaacagagatggcttctccatcattatgagcctctattatccctccccacagacctttttctgtaccctcgtatgtctcccaaaggcctttctaatcccatttaattgggagatggtctcagacaggggtgagagtctgtgcccaacctgagaacccaaagaatggagtgcctttgaaggcttatcactcacggtaaattgcagtgtgcagctgtgatcacccaaagcgggtggatcaggactccagcgcagggcaagtagtcagatttcaaatagaccaagtaagggggagtggagctgactgtgtaatctggattaaaggccaaagcaactggaaagagaagcatagacaagaaattccaagatttctcagtcatcaccagaaaaacttcaggaaagtcatttaataggctccaagttcccctatccttttctctagcaactttatctgtaaaatgacttactttgttctaaaacacgaagaaaagacaaatggtagaaacatatctcttttgaaaaataaaaagtgtttggctttttcactgtcaataaaatctttcaaattaaatgttcaactttcttaaataccttccacaatttagtgggttgtatgctaaatcaacgaatttttttcactatttttaccaattttagaatgcttcaataagtcttaaggcattcttatttagaatgctttaataagtcttatctctttttcccaacaacaactcaagacagaattatataagtatcatgacaagaacagaccaaatgctaagagtctgaggaggggaaaaataatgtattgttttaccaaatatacattgagcacctagtatatgtcaagctctgttttaggggcttgggctatatagtgaacaaagtagatattcctgctctcatatattacaattaatgaagatattcagtaataataaacacaacacacaaataaactatgtaggatgttaaatggtgattagtgctatggaaaaacacacaagtaaactatatatgatgttaaatggtgattagtgctatggaaataaaagtaggacagggaaagagagaaaggtattaccaattgtgtgttgcgggagaaggaggggtttcaggcagtatttgtttgttgtttgtttgagacaggatctcactctgttgctcagattggagtgcagtggcaagatcaggctcactgcagcctcaacctcctgggctcaagcaaaccctcctgagtagcttggactacaggtgtgtgccaccatatctggttaatttttaaattttttaattttttaaatagagatggagtcttgatatgttgcccaggctggtctcaaactcttgggctcaagtgatcctcccacctcagcttcccaaagtgctgggattataggcatgagccattactccagtctcaggtaatattaaaccagtcatcagagtataacttcatgggcaatgttgaacaataacatgaaaacgggggaagttgctagtcaaatatctgggtgaagggactccaggcagaggcaacagctgcagcatgggtcctgaggcttgtgtcagttacatcacagaggccatggctgctgacccagagtgaatgaaggggagcagaggaggaaaggggctcaaagaagaatggagggttttgtagaccatcgtaagaactcggccttgtttcctgagtacaaatggaaccactcaaggatttgtgcaaaggagtgatgacagtctcctcatggagaacctgtagagtgtagaagtatagaggtagaggggtctgttaggagaataatttgctaatccaggcaagaggtggtggcttagatcattgtgagcagtggagatggtgagatgtgattgaatttaggatacatttagaagataaagccaacatttttctaagagatcaaacgtggggtatgagagaaagagaggatttatgaataagcctgggtttatgcctgagtaactggaactgtgccaggagatatctgattcttcaatgttctgctgtgccctctgtggtgcagaacatcaatcctgttgcagacaggtccagagtcaggtcttaggagtgggtctggtatttgagtgacaatgtccacgcctcccacaaaagcacacaagcaaacctcctgcggcaggcaggcaggcactatcacaggaggaaacttgatgggaacggggcagtggagagggacagaggaccatcctacacttgaattctggaatgatgcctctcgctgttacccgtctttcatgcttttcccaggatttctctttggtgggtaaagagacaaatatgcacacactcaccagtcagattcaagagggcccagaggaggataaacttcatgatgatgttgaaagcccagtttagctccagtctctggaaaactgggaagagagagagaaaacaactaaataaaacaaagcaagattgtagaattggaaaaatatatcatctgaattattttagtagcaggattcagttttagaaatggtgtccattattcagaggagagtgtagcgtcatctgtcagagagacaagaatagagtcaagtgattggtccccaatacagttgaaaatggttctggaactcagagttctgccctctgtcttcagggaagaaagtaccaaagctaagttgaagttcatgatatctctacagacgcctcctgtctggtctcctttttgccagccttggtaggcaggttcccctctaaactatgtgtgggctgctgcccctcctgtctgtgtgatgctatcccccactgtgtgatgctatttttctccagtggacataatgtagccctctggagctgacattgcttcctctgcctgacattaaactcctctttgaaatacattaaccttttccttcatgtcactgtttatccatttattctgtgaaccaacctgctaattatttatcttatgtatctaacttgtgctaggatctgtgcttgctgttggggttgcctcaactgaaggatttctttcctaccttccaagagcttacagactagtgggaatgatacttaagttgatggttatgaaacaaagtattcagggctaaaaattgagatatgccacagactagataaaaatatttgcaaaacacatatctgctaaataattcatgtataaggaaatagtaaaattcgacattaagaaaacaaacaacacaacctaaaagtgggccaaagatccttaccaaatgttttagtctgcttggactgccataaaaaaaaccacagtctaggtgtcttacacgacagacacttactttcttatagttctgaaggtcagaagtccatgatcaaggtgttgtcaaattcagtttctggtgaggcctctctccctggcttgtggatgatcaccttcttactgcttcctcacatggcctttcctctgtgcacacagagataaagagggaaagaaagctctctggtgactctttttataaggacataaatcctattggatcagggctccacccttctaacctaatttagccttaattgcttccttttaggccctatcttcaatacagttgcattgaggtttaggccttcaaacagatatattttgcagtgatggggaagataacaccagagaatatatacagatggtaaatggcatatgaaaaaattcttaacataatatgtcattagggaattacaacaacaatgggataccactacataccctgtggaagggctaaaattcaaacactgacaacaacagatgctagtgaggatatgaagtatcaagaactgatgctggtgagaatttattgctgatgagagtgcaaaatggtacagtcactttagaaaatagcttggaagtttcttattaagctcaacataaccttactatatgatacagcaattacacttcttgatacaccaaaagatttgaaaacttgtgttcacaaaaatcctacacataaatgtttatagcagctttgttcaaagttgccaaatcttggaagcaaccaacatgtccttcaatagataaatggataaacaaagtgtgattcatccatataatgaaatgttattcagagattttatgatttaaaaaacttaactctcaagccatgaaaagacatggagtaaacctatatgcatattgctaagtgaaaagagctagtctgaaaagattatataccatataattccaattatatgacattctgggaaaggcaaagctatggagacatatgtatgtgcaagaacttttttcctataatgacttcttttcctccggatagattccaaggagtgggattgctggatcaaatggtagatctactttcagttctctaaggaatctccacactgttttctatagtggttgtactagtttacaatcccaccaacagtgtaaaagtgttcccttttcaccacatccattccaacatctatttttttttttgattatggccattcttgcaggagtaaggtggtatcacattgtggttttgatttttttttcatatgttttttggccagttgtaagtatttttttaagaattatctattcatgtccttagcccactttttgatgggattgtttttttttttcttgctgatttgtttgagtaccttgtagattctgaatgttagcgctttggcagctatacagattgcaaagattttctcagggttgtctgtttactctgcagattatttcttttgttgtgcagaagatttctcatttaattaagtaccatctatttatctttttgttgcatttgcttttgggttcttggtcataaagtcttcgtctaagccaatgtctagaagggtttttcctatgtaatcttctagaaattacatggattcaggtctcagatttaagtctttggtctatcttgagttgatttttgtgtagagtgagagatgaaaccagtttcattcttctacatgtggtttaccaattatcgcagcaccattgttgaattggctgtcctttccccactttatgtttttgtttactttgtcgaagatcagttgattataagtatttggctttatttctggattctctattctgttccattgggctatgtgcctatttttataccaggaccattctgttttggtgactatggccttgtagtatagtttgaagtcaggtaatgtgatacctccagatttgttctttttgcttagtcttcctttggctatgtggactcttttttggttccacatgaattttaggattatttttctagttctgtgaagaatgatggtggtattttggtgggaattgaattgaatttgtagattgcttttagcagtatgatcattttcacaatatttattctacccatccatgggcacggaatgtgttttcatttgtttgtgtcttctatgatttctcagcagtgttttgtagttttctctgtagaggtatttcacctccttgattaactatattcctttttttgtgtggttattgtaaaagggattgagctcttgatttgattctcagcttggttgctgttggtgcatagcagtgctacttatttgtgtacattagttttgtgtcctgaaactttgctgaattcatattccagttctaggagctttttggatgagtctttagggttttataggtatacgatcatgtcatcagcaagcaatgagagtttgaccttctcattactaatttgggtgccatttatttctttctcttgtctgattgctctggctaggactttcagtactatgttgaatagaagtgatcaaagtgggcatccttgtcttgttccagttcttagaaggaatgctttcaagttttccccattcagtataatgttggatgtgggtttgttatagatggcttttattaccttaggatatgtcccttctatgccacattttgccgattttgctaagggtgttaatcataaagagatgttggattttttcaaatgctttttctgcatctactgagataatcatatgatttttgttttaattctttttatatagtatatcacatttgttgacttgcagatgttaaacaatccctgcatccttagtatgaaacccacttgatcatggtggattacctttttgatatgctgttggattctgttagctagtattttgttgaagatttttgcatccatattcatcagggatattggcctgtagttttcttttttgttatgttctttcctggttttgatattagggtgatactgccttcatagaatgatttagggaggattccctttttggaatagtgtcaatatcttttggaataatgtcagcaggattggtaccaattcttctttgaatgtctgatagaattcagctgtgaatctgtctgatcctggacttttttttattggcaactttttaattaccatttcaatcttgctgcttgttataggtctgtacagagtttctatttcttcctggtttaatctgggagggttttatatttccaggaatttatccatctcctctagattttctagcttatgcatgtgaaggtgttcattgtagccttgaatgatcttttgtatttctgtggtattggttgtaatgtctcccatttcatttctgcttgagcttatctgattcttcccttttcttttcttggttaagctcattaatggtctatcaattctatttatcttttcaaagaactaggtttttgtttcatgtatgttttgtattttcttttgttgttatttccatttcatttagttttgctctaatcttgattatttcttttcttcttctaggtttgggttttgttggttcttgtttctctagttccttgaggtgtaaccttagattgtctatttgtgcaatttcacactttttgatgtagacatttaattctgtgagctttcctcttagcacctcttttgctgtatcccagaggttttgataggttttgtcactattattgttcagttcaaagaatttttaaattttcttcttggtttcattattcctgcagtagttcttggagaaaaagttgacgatgtgggtatccacatgctgctctgtccctccaagtgggagctgcaacctagtcctgctcctatccactaattttttcttgaactcctcctaaatgtgtatttttattaagccattaaatttgtgatgtttttacacagcattagaaaactaatacaaatgcatactggatgctggcatcatattctataatgatgattccatggcaagggagataagaagcttgctctcatacatcataatgcttaatgagggggagacagatgtaacaagaacaatcatcgtgaatgtcaaaggaaaagggaggtagagaagcatgtcgcaggaccctaatataaggtcagaagaagaccttctttgggaagtgaagtttgaaacttgaaggatgagtagaagttagccaaatgaagagatggggaagaaatctccaggtggatgaaccagagctccaaggagaacaaggaatgtaaaaaagagaatgaagagagagacaggcaaggagacacagataggagaatcatatgaaacagactttgcaggatttgtcgagtaagaactgcctgcaaaggaaatagaggaggcaatcagagagtaggtcaaagaaacatgtcctcgggttctgtattttagatgagtgaggctttattttccttaaatgataacaggaagaaggtgatagatagggaaaattggagataatcaatacagcaagtccatgaggaagtcagacaagatggggtccatttcacaggtagagatagaggctgtaaataataaggtcttacctccactatagcaggaagaatgaaaaagaaaaaaggtgggggaaagcaagtatgtttgcagttttagtggtggcaatttcagagaggtatcttctgctggtttcagtttttctctactcccacactagaggtcatctgctaaaagtgagcattaaaagtttgaggagagaggagagggtttgaaattgctactgcggagaattatacaaacaatttattggagaagataggattgccaataagtgctaaagatgtaattcaagggttacaagaagtaattagttgagctctataatcctaagtgaattaacacgggaacagaaaaccaaatatcgcatgttctcacttataagtgggagctaaatattgagcacacatggacataaacatgagaacaatagacactgcagattactagaagttggagggagggagaggggcatggtttgaaaaactacctaccaggtactatgctcactacgtgggtgatgggatccataccccaaacctcagcataacacaatatacccacgtaacatacctacgcgtgtcccccccgcatctaaaataaaatttgaaattaaaaaaaaactctggcacaaatacagacatgattcattaagggtgctttgggcagtgagtcagagacaggaaactggggaaaatgtgagagaagactggcaaactgaggacgtgtcatttggatggggccagaaattaaagaaaaaaataatcatatagtgaatgaaatggctttagtatctagattttagaacaaagaaaatttctgtgaatggaccagaacaagctattggtcttagatgcacctaagctctctggttttggttttttgttgttgttgttttagagacagggtcttgctctgtcactcaggctggaattcaatggcacagtaatagctcattgcagccgtgacctcctcccctgtcagcctcccatgtagttaggagcttttttttttattactattttatgtagaggcaaaggtttctctgtgttaccaaggctggtcttaaattcctggtgtcaaacaatcctcccacctcagcctccaaaagtgctgggattatagacctgagtcaccccatgtgggttttgttttgttttgttttgttttgttttgttttgttttaggagaagagaaaacacattcaggcatccaggttcagggtccaaaaaccaactcacctctgcagactttatagatgccctagattcactgcgcccctcaagggaagaaacctcaaacctctttacgcctcccacagtgggtttctcctatggtgtggttctctgttcccatcttcactggcctcctctgcccatcttttcttttttaacataagatccctatgtcatattgacccttttctctctgttgctctttggtctctcatatgtcactcaaacccctaactttggggggccactcagaatccccttaactctgtctctgtttttagatgatttggacagtggctatgggatgctgcacatctccccaacatatgccagtgtgagagaagggctgagcacccatcacagctcttctccataggagagagccctcccaaaccccgcagctcccacccaccaatgtaggactcctgtttgttagtcactcctcaggaagcatctggatttcagatcaatgtctccaactgcctgctggaaataaccacctctacatccttaaaggatctcaatatagcaggccacctgtctcctcatgcaggaccatgctcttgataccttgcacacaaatgcacttgttatcctcatattatctttgagaatcaccatcttacctgttgtccaagtcaaaaacttgggagagttatccctgacatctcccttgcctttcttcttacagtaagtatgtccaaatcttacagatgttacttccttagtatctctcaaatcagaaattggatggtgttttgtttactgtaaaagcttcaatgacaccccctccaatgcctacaaggtaaaaatctaagttcctttatagagcaggtcaggcccttcatctctcaacatttgcctgcctataatagaataatattttatggcattatttttccttttctacaatttattttctaccttcaaggtttgcttatttacatatattttccagcctataccacactttcatatgcttttttgccttttaataaactatgtgctcagttttacaatatcctcccctaatttgtccacctctctggtgttacttctcctggcactaccactcagaatgttttattttatgttttcgtggagcttactgctcatctctgttatagcagttatcaaaaggtattgtagttagctaactgatggccaaggtcatgtcatagtcactcaggcatccttagcaaaggccgtgcctactaaacagctagtggttaatatttgaatgaataaatgaatgaacaaacacaaggtgaagaggttgctaaatttctcattatcctcaaagtttacatgacaaagacagcaggagtcatggcacaggttctcagctactcattttttttttttaatcagatgtttcctctttggattttgttccaaaataacaaagatgaagagagttgtagatccagtgtagaaattatgaagaggtggtactgaggggatatgggaacagaggcgcctcagtgggtatccataattttcaagatccatcttgcatagctatgaacacctgtgaagaatccttcacttcctagggtgacacttccttctgcccaggacaagattccatgcaacctcccattgcagatggctggggcagccgaaacatccttatagagagaaggaacagaaggtcaatgtgtccttgtccttatggaacaagagtaaatgccagctgggcgcggtggctcatgcctgtaatcccagcactttgggaggcagaggtgggtggatcacaaggtcaggagatcaagaccatgctggccaaatggtgaaaccctgtctctactaaaatacaaaaattagccgggcgtgatggtgcgtgcctataatcccagctactcagcaggctgagaatcacttgaacctgggagacggaggttgtggtgagccaagatcatgccactgcactccaggctgggtgacagagtgagactacatctccaaaaaaaaaaaaaaaatagtaaattccaaaaagcggcacataacagtagcaaaaccatctaagagaatgggcttatttttcttgagaggtggcagacttctctttacatccacataagtcttacttctaaggttcaagcttgacccaacccaagtgcaagacaaaggacaaatagttctaccccaaatctctcccactctgaaagatgagaagggcaatggttagaaacccagaggtgagtagggagaggagagggactccagctctctgcttctctctcttaggaggccttttggatgagtgctctttgattctgcattatcatcactcctcccatgggactcttgctatcttccagtatagagaagggagaaataccttgtttttagataggatccttagagggtgtcctacacaaatgatgtttcctgcctgttcttctttgagtctatcctgacagtcacggaatggaagagaatattggttgatccatgtcaggatgtcaggatcactgactgtgggaaagagaaaacaaactccagagtgactcttcttatcacaagggctcttctaaccagatcctgttttgtaaataaattcagtcctgagaatattcaatgcaggtagcagcagacactccattctccgtaggattccttgttcagtaatctccatgttagagaagtaggtttataagtcccctttgtcagatatcaaatccataggtctttctgtgctatgcatcatttataaaattttgaaaaaactgtgagttattagtgaccacaaggagaaagagacagtaacgaaaccattgtctcaaagattttccccctacacacacacctttattgggcatctacttgatccttttcacgtttagttataaagggagaaactatttttagtgcatataaaactgctttttgagttacacagattatttataagtgtttatagtatgtgtattgatataaatatacatatatatttcccccaagaagttgtcatgttgttcatctccataatagcaattgctattatactgtcaaattcaggatacagggactttaacgaaggtatcatgtaatttaaatttctggtagagaatagcaaagagaaaggaaacaaaaacgctgaccaggccgggcgcggtggctcacgcctgtaatcccagcactttgggaggccgaggcaggcggatcacgaggtcaggagatcgagaccatcccggctaaaacggtgaaaccccgtctctactaaaaatacaaaaaattagccgggcgtagtggcgggcgcctatagtcccagctacttgggaggctgaggcaggagaatggcgtgaacccgggaggcggagcttgcagtgagccgagatcccgccactgcactccagcctgggcgacagagcgagactccgtctcaaaaaaaaaaaaaaaaaaaaaaaaaaaaaaaccgctgaccagagattgctcaagctaagtccagtgttgtttaaggagcaggattttttctgatagagtgtatccaatcaaatgccctaaagcagattaggccagaagttgtcaggtcagagaagaaagagaaattatgttcagttttatgtttttatgggaactaaattaaaatatgtgtaaaaaactaggtgaaagtaacttaagttacttgaaataatgaatttctaataaatattggaagccctgcaccagaaagcttatagaggtagagtttgtcactgtgattttgacatgcagagcctatatacctctgaatagttttgttttgttttcaaattgtacgtaataaattacttctgtaagttgtaattcaattactttgaataagacttacaaaatcaaggacaaaaatcatacaagctgtaactgttcagaaaacatgttcacttagattcccaagtacttgcttctaagtggaaaaatgaatctgcaaaatactgagaatataatagtttctgctttttatttctgttttttaccaaagactgacttctaaaattccacttttatttgcttttacagagcacgtgcattgttctgtagccaccagagagagatttaaacctgattaatagatccaggacaacttgcttgagtgaacataacttttgcagtataatcaatgtcagccttcacttcttaaaaccagctgatcaggatcagaggtcctctgaaaaacacgcctcagagcaccaatcaatcaacagcaatccccctgaagtagccaggcctcaacagatgatggaacccattcatacctctgaaagtcctccaatccctcaactccaagcttcccacaaaccccttatgctaatcagcactccattctgcttagtgggatggtgcctggtcagcattgctctgacttgctgtaataagcaatagatttacatttgtcatttcatttcagatatcaagtggtggtatcctcatcctcaacaatacctaaggagagaataatggagtaacagccaacaaggaccaacaaacttattagaaagtagttttcttcacaggtgttctttattagacagactcctgctgagaccggatctttctgctcatcccaatttcagctcacaggggagatggatgtgtgcttacaacatgggctgccactgtttttcttgtgaggcatgtcagaccagggagataacaactgattatgtcataataatcaatttccctacgaaccaccaaagtctccacccctaaatgggaactctgggaagaagcagtgggtatgagtagcactctgtgcagggaaccagctctggtgacaggacaggtactccctcaaccattctcttctctcccagggttctctgcacataactgggttctctgcggaaggtgtaggaagcatcttctgctgcttcaccgcatcacatatattttatgttcatttcccccactgttcttccattgtgtgatgggctttcagcaactatcaatgggtgtcaccctcccgcaggctgccttcatactgtctttgtgcacgaggactcctatttctcccacctgtatttcaatccagttctctggactcttgtcttcaatattctagagatatgaaaattactgtctgctccatttgttggtgtcagagtggctgccctttatcagtctctttgaattttatctttgacctccagtgatggtggtttgggtccctggcaggaatccctctatggtggacaacattgtctcatagcagcgatttccattagggacatccctctacattttctcccagctccaacctcctcagcataaagaacacagcatccaacacatacggtttttatattcattccaggtccaggttggaataaagcaggattcattaaatggaatgggttccaaggctatggctatagtccccacatgggggttgagtgaagcaggtgttgatagcttgatcatcattaggtcatcgttcaaggattttgcatcaaagtcagggtaggtcacaatcgatgaatagtttcatatctgttgtttcttgtttgtgatgctaggttgagaaactcccagtcgaatttcaacactttggaagaaagagggcagagagatgagaagaaagagagtcataagataatggattacaagaaatcctacgggccaccctctttaattattttaactttatttcttaacctgagaactgacatggccttcttttgtctataaaacaatagcagtaatttacagaattgttgtattagagacataaatttgtaaaatgtctgacatcgtgtctggcaactaaaacacaagtcagtggagccttgttattaagatttttatcatctgaattagcagctaatagagaggcagcacacatccagttcatgtgttaagtatggatgtaagaaagaacatctgccttttcaatttttattctggaaggatgtgaactgtgtatttcctttgtatttcccatataccacagagcagaggttagtctgcgttaaactaaactgccttgaacagccagatggctaagatttctgaatttgaaagaaccgttctatactcatgaaactgagtaggtcttgatcacacagcacattctcacacacaacagaaacactgagatttgcaaggaattgctttattttgtatcgtgctcccttgccctctactgtcactgcatgatatggcttctgcctaagtctttgacctcatcctatgagcgatccccctgctcattacccttaattcctgccgatttctcagcttaatatctttgttacttcagggagtatatgaatattgttcccttggcctggaatatcccccaggatttattcatttggctggctccttctcttcctatggatctcacctcttcagagatgatggacatgaccacattaactaaagcagatttcttatttcatgcccatatattagagcttgccattaaaaaaaatactttgtttttggccatttatttgtggtggctactccctctaccaaaatgtaagctccatgagggaacacttattttcatcttgttccttcactgtttcatcagtgattaagtagcccttgctagataataaatgtttaacaagtattgttgatgaatgaatattatttactacccatgagagggaatcctctgacatcttcctactgatctcctcctaaactgcccaaatttgtgttctgtttcccaatgggaacaagagtctctctttttccgtgtcttctgattttactaaaaattttctgggatgcttcaccagatctacatttgtttgaacagattcctcccagctcgcaagagaaagggatacttacggtaaggggcagtgggcagctgtcaatacccagtcaaggtgaatgagagaccccacgcagggttctgggaaggactgaagatagaccatgtaaggaatagtaaaattatatgtcagctcctgattatctttagagtctttagccagagcagctcctggagaatcaaggggccataggtggaaagggaaaaagaagttaaaaggccagaactggctagggtagttttccctaacctaaggttttcaaatgtaatgtaaaggtcttcaatttacctttcatattttaatcaaggaaaattatgcatgtcctctaagttatacacaataagaaaattgacacatggttttgctgagatgaaattacattaaaattctgtgaaacttacttacatgctgatcagaagctcctattggcagtgctgtgtgttacaaagatgaaaaaaataatgactacttgaaatttttttttaattcacttttgccataaatgggggtaaaaaagtatggcgtgatttaaatttttttaaattcacttttgccataaattggggtaaaaaattactgcctgactttggtgatgaaagaaatagaaaagcttagggcttccagagcccctgacccagctcaccccccttttccaggcccatgttctctaatgtggttccttttgttttcttcaacggttgttttatttaaatgtcctccgcttcctagctgtttagttgtgcccagctactcctctttccaatctttcatagactatcctgggtgtcacaataggcagaaacaaagccccaaactctcaccagctgcactcaagagagcgacgatgagaaaacccttcgtggcagacagatctcgccaggaacagacaagttgatcaagctgtaaactgtcccaatctttagtccaagtgtccttgccaagaacagctgtggagattatgggcagaagacagatgagaggagagcagtcttcacatgagtccttatcaagacccaaatatatacggcattgctgggagccgtctctgatgtgggtgaaagagagtggcacagaccaagccgaggtcctggtgcctcctttcctatcctacaaatcttgcctggagttattatgtacctgctgattttccttctcctctctatgacacaacctttctttgttgtctccttctccctctgtgacttaaaccgctctccctgcccatcttgctgccatctcacctcttccagagacttccagaggattggggtatgaaatgcacttaataaatcattgcttttttcattccttgtaattttagtgatgaggaagctatggttctcttggaagttagtggcaaagtcaggactcagaactcagtctccatattctctgtgtcaaggctgaactctatcttagcctgtgttcccagaaaagagcaatggttaagaaatccctccatcgttttgtgttcttagaaatgaattaccacaaagagctacctttcctatatgacttaaataagactctctgccccttctttctcccagctcccagaaaattttgcatggttctcttgcttacctgtgatgcatcaaatacagacctttcctcttttgcccggacttgctgacatggccagacatggaccatccaactccccattttttgtttcaaaaatgattagctgagattagaatggtttgtctcttcgaaactagctacattaaaaaataaacatttcctattcagccaactaactgaggcttccccctgattgtaaaacaacccccactataaatctccccacctcaaacttatctttttctccctataaaaattccagggcaaaaccaccctgccaagatacttcataatcttcagatcttggatgctctcctattggatgatctgaatgcaaccaatctccttactagttcactttttgtcttctatgctgattactctcaaaatgcatcccattttttctttttattagctacccgtatatggtaacttccagcctgtcccacagagacgggtaataacagtaggttcaatcccacattttatatagagtagactggaaaaatgcaaactatatagtatcaaactgatctttatcagagtaattaaggagctgatcagttataaaagtccataaacataacattcctatatctgtaaaaattataggcagacttagttctcctaaaatttaattattaacttaaaacctcatcagtatgttcccatgtactctaaacttttggggacaatatttctttagtacccaaaggttttaaaataataattattaaaataataaagtcagtatttgttttgtaccatgtgacaaatactgtgctatatgcccagcatgtgtgacctaatttatcctttatcacaggcctatacattaaatatcgttattatccattttcaagctgaagctctgtatggttaaaaaccttgctcacaaccatactgttgaagcccacgacccccaacattttaggaaatccagcatccctctacttgttccaattatttatctggtaggactgggccttatttctgctaagttctttgcttatctccagacttctttgtcccagcacatgaaaacagctgtcttcattttatttcttaattcaccactaacctaattctagggtgggtttcagacttttactgaagctttggagatattacaggaaattttggcaccagcctgaaaacatctttaaatagtatatcagaaatcactttgtgaatgtttatgaatcacctacagtccacggagtctgttaacctataacctggtttctgccacattgctggaacctaccctgaattccttttttattttcttgttttcttcatgtctttagtcagctcacatttctgctgcccagaagccccaagtagagagagacaaacatctacccttttaagctatcggaggagaactgaaaatttttgttactatcttacattgagaaatccatattttctctctctattctcaatctctgcctccctcccacaaagcctcaccaatgagaatatgaaggcgactattgttagtttcctttcttttaaaatgtctttttcttttcttttctcatggaaagaataggctaaatacaactatttgctttgtaaagaagtgagacgatacaatttatttaatggatataagagattatagtcactatcttctttataatttctcgtataatattctaataaaggtcactcaattgtgacctcggcaagcataattcactgcagaggcagtggcctagagctgtcagtttcccctggaggctcagtccagggagttgctgagttggtactggcatgacagctctggtgaggggtggctggaggcccaggcctggaggacctgcccagtgaggagatatgggaataggcacctacgtaccagtctggccacttttctgtagggttgctgcaatatgcttggggcctgctccagtctctagtcaccttggattttctagaacctggaggtgtcaccaatgaaggctgcaaaacagcaaagatggtagcctgtccctgcctctgggagctttgtcccagggaggtgcagacatattggcagcccaaaagcacctgtaggatgtggctggagaaaccttacaaaccagaagagattgcaggtctacattcaacacaattaaagaaaaaaatcttcaaccaagtgtttcatatccagccaaactaagtttcctaagtgaaggagaaataagatctttttcagataagcaaatgttgagagactttattatcaccagacttgccttacaagggatcttgaaaggagcactaaatatagaaaggaatgattgctatcagctgatacaaaaacacacttaaacacacagcccagcatcactgtaaagcaaccacacaaacaagccaacataataaccagctaacagcacaatgacaggatcaaattcacacgtcaaaactaacctttaaaactaaacaggctaaatactctacttaaaaggcacagagtgacaagctggataaaaacacatgacccaatggtatgctgtcttcaagagatccgtctcacatgtaatgacactcatagcctctaaataaagggatggagaaaaatctaccaaccgattagaaaacagaaaaatgcaagggttgcaattccaatttcagacaaaacaaagatcaacaaaagacaaggaagggcatgacataatggtaaagggttcagttcaacaagaagacctaactctcctaaatatatattcatccaacacaggagcatccagatccataaagcaagttcttagagacctacaaagagacatagatccctacactatgatagtgggatacttcaacattccactgacagtattatatcattgaggcagaaaattaacaaagatatttaggacctaatctcagcattggaccaaatggttctgataaaccttcacagaagtctccaccccacaacaagagaatatacatttttctcattatcacatggcacatgctctaaaattgaccatgtaattagacataaaataatcctcaacaaaagaatcaaaatcataccaatcacactcttgggccacagtgaaataaaaacagaagtcaacacaatgaaaattcctcaaaacaacacaattacatggaaattaacatgctgctgaatgagttttgggtgaacaatgcaattaaggtggaaatcaagaagttctttgaaaataatgagaacaaagatacaacaaaccagaatctctgggacacagctaaggcagtgttaagaggaaaattcatagcactaaatgttcacatcaaaaagttagaaagatctcaaattaacaacctaacttcccaatgaaagaattagagaggcaagaacaaatcaaccccaaaagaggataagaaataacacaaataagagctgaaatgaaggaaattaagacacaagtaaaccattcaaaagaccaaagaatccaggagttggttttttgaaaaaaaaaaaaaaaaaaaaaaacaaagccactagttagctatttaggaggaaaaaagagagggtccaaacagacacaatcagaaatgatgacgggaatgttactactgaacccacagaaataaaaacaaccatcagaaaccaatatgtacacctctacacacacaaactagaaaacctagaggagatgaatacatttttggatacatacaccctctctagactgatccagagagaaactgaatccctgaacagacctataacaagctccaaaatttaatcagcaataaatagcctaccaatcaataaaagtgcaggatctgatggatccacagctgaattccactgtatgtacaaagaaaaacttgtaccattcctacagaaacaattccaaaaaattgaggaggaaggacttctccccaactcattctatgaggccagcatcatcttgataccaaaacctggcagaaagacaggaaaaaagaacacttcaggccaatatctttgatgaacaaagatgtaaaagccctatacaaaaatacttacaaactgaatccagaagcgtatcataaagctaatccaccatgatcaaataggcttcatccttgggatgcaaggttggttcaacatacaaaaatcaataaatgtgactcatctcataaacagaactaaggataaaaatcacatgattatctcaataaatgcagaaaaggcttttgataatattcaacattacttcatgttaaaacgcttaataaaccaggtattgaaggaacacacctcaaaataataagagccatctatgacaaaaccacaaccaacattatactaaatgggcaaaagctggaagcattccccttgaaaactggcacaaaacaaagatgccctgtctcaccacttctattcaacatagtattagaagtcctagccagagcaatcaagcaagagaaagaaataaaagacaaccaaatgggaagagaggaagtcaaactatctctctttgcagatgacatgattctatgtcaagaaaaccccatagtgttggcccccaagctccttcagctgataaacagcttcatcaaaactgcaggatacaaaatcaatgtacaaaaatcactagcattcctatacaccaacaacaaactgagagccaattggaaagttagtcccattcacaattgccatgcacaaacaaaaaaacccccaaaacctaggaatacagctaatcaggggggtgaaagatctccacactgtgaattacaaaacactgctgaaagaattcagacaagacacaaacaaatggagaaacatcccatgctcacagataggaagaatcaatatcattaaaatggctatacttcccaaaacaatttatagattccatgctattcctatcaaactaccagtgacattcttcacagaactagaaaaaatattttaaaatttatatggaaccaaaaaaacaagcccaaatagccaaggcaatgctaagcaaaaagaacaaagctgaaggaagcaagttacctgacttcaaactgtactacaagagctacagtgactaaaacagcatggtactggtacaaaaacaggcacatagaccaatggaacagaatagacagcctagaaataaggctgcacttctatgacatctcatctttgacaaagctggcacaaacaagcaatgggacagagcctctctattcaataaatggtgctgggataactggctagccaatggagattgaaactggaccccttctttacaccatgtacaaaaatcaactcaatatggattaaagactaaaatgtaaaacccaaaactataaaaaccctggaagacaacctaggcaataccatcctgtacctaggaatgggcaaagatttcatgactgtattagtcagtttgcatgctgctgatgaagccatacccaagacttggcaatttacaaaagaaagatatttaactggacttacagttccatgtggctggggaagcctcacaatcatggcagaaggcaaggaagagcaagtcacatcttacatgacggcagcaggcaaacagagagagcttgtgcaggggaactcctctttttaaagccatcagatcttctgagacttattcactatcacagaaatagcatgagaaagacttgctgccatgattcagttacctgccaccgggtccgtcccacaacacatgggaattccagatgagatttgggtggggacatagtcaaaccatattaatgaaaaagacaccaaaagcaatcacaacaaaagcaaaagttgacaagtgggatccaattaaacttaagagtttctgcacagaaaaagaaactatcaacagagtaaacagacaaccttcagaatgggagaaaatgtttacaaactgacaaatgtctaatatccagcatctataaggaacttaagcaaacttacaaaaggaaaacaaaggaccctattaaaaagtgggcaaaggacatgaacaaacacatctcaaaagaagacatacataaggccaacaagcatatgaaaaaaagctcaatatctctgatcataagataaatgcaaatcaaaaccacaaggagatatcatctcacgtcactgagaatggctattattaagtcaaaaagtaacagaggctggcaaggttgcagagaaaagggaacacttatacactgttggtgggaatgtaaattagttcaaccattgttgaaagcagcacaacaatccctcaaagagccaaaagctgaactaccattcgacccagcaatctcattactgggtatatacccagaggaatataaagcattctaccataaagagacatttccagaaatgttcattgcagcactgctcacaatagcaaagacatggaatcaacctcagtgcccatcagtgacacactggataaaataaatctggtacatataccccatgaaatataacgcatccatagaaaagaatgagatcatgccttttgcaggaacatgaatggagctagaggctatcatcaaattagcaaactaacccaggaaaggaaaaccaaataccacatgatctcacatataagtgagagctgaatgataagagctgatgaacacaagaaggaaacaagagacactgaggtctacttgagggggatggtcggagaagggagaggagcagaaaagataactattgggtactgagcttaatacctgggtgatataataatatgtacaacaaaccccatgacacgtgtttatctatgtaacaaacctttacatgtacctcaaaacctaaaataaaacttataaaaaagcataattcagttcccaagagatttttcctggatgtgagatgatgtgtggcttagaaagtattcctttattgtttggctctcttccctacaaaatgtaaattctaatttcgttcctcttaaatatgaactggcataattttggagaacagtttctaaaagtcaataaatttccatctggctctcttcttcaaatattcttagagtacatctgctttgctataagtaagctgaagccatcccatctggaggcaaatagagaagccatgcacaggtgctgtggccaaaaatcaagctgaagtcccagctgacagacagtatcagccaccagacctatgagtgaggaagtctttgagatggctccaagcccagccaccagctgcctgcaaagcatgagagattcccagcaatgactgcctataggagcccggtcaaatcctaaagccatgagaaatagtgataacaagtgattgacattgctatattctgctaaatttgaagtggttttctatgcagtaatcaataaccaggactggagtcaaatcatttccaactctactccgttttctaatggtgataggtgaagcaagtatgccaagagggtgattctgcctgagtggttccggggtccctgttgtgtcctcccaatcctgaaggactggaaagcaatttatctgggtccattagtttgctctaatttcacgtttaagcctcaattctggggagtggtggcttgatggacggagggatcaagatcatccagagaagggtttggcagggcagtttaaagtgagcatgaggtgtgattctttccacctttagaactaaaatagaaaaaggattagacaacgctcctatgagagaagatgttggaatctacagtagaaaagataagagtatgagtgttcataatacactacctgtaattctcatggtagcctctgaagcttgatcataatgagctctgattatgacacattttgtagccatacgcccttgggcaagtttcttatctctggctttatcagtttcctttcttgtaaaatgaaaagcccattacatcgattgtttttaggaaaatgaaaagagttagtgtttttaaagtggctttggacactgcctaacaaatagtaaatgctagttaaatgttggttaaataaaataaaataactgtaactttaggattcccatattttccaggctttcagggacagtaatttatcttatgtcaaaatattgttgtgaagttcttaaatctttatgatattttcttgtttctttctttgtttttttttttttttttttttttttttttttggttaacatggtgaagagcgtggagaaggacgtttaactaccttaagcctcagtattctaagctataaaatggaaagaagattagtacttacctcataagatagtcatgaggattaaatattatttaaaaacacttaagcaccgtatatgacacacagaagataataaatgtgagttatcatcactattacctttttcacctctgcaaaactcctgagtactagaaaggagaaaaccttctggatgctcctggttcacaggattgtgtgatttggctccagcaatgtcttggaactgggtccctcctgaggtcagtgattcagaattactggacttcttaggtttcagctcttcctagctcaatacccctctctctaaagagaaaaagtattaccccctccaattctactcatgtttcactagggacatctcgtgactagcatgaggctcagaaaagatgtggagggatgagagggtggagcaggtcagtgctgggaagcctcccaacctgaatgggttgcactcattgtcagctggctttcttcctgcagattagggtggattaagggatttttgtaaggtgagaaagattaatactacattttataagccagacatcctggaaatttcattaaagacaaatgttatctttgttttataaaacccaacacctgtttatcaagaaaaatgcagaaaaggaacaacataaatatgaaacaacaataaaaacctgcaactccttttagagttgctcgcattgacatgtcaggcaccacaaaatgatctttttcctttaccccattctttatattttttccctcgccaaaaaagtaaataattcttttttctctagtgattctcctgcctcagcctcctgagtacctggacctgcaagcatgcaccaccacaccccgcttattattattattattattattattatagatacaaagccttgctatgttgtccaggctggtctcaaactcctggcttcaagagatcctcctgcctcagcctcccaaagtgctgggattgcagacataagccattgcacccggccaaaatttaatagttgtttatactaaaatttcttctctttatattgctgatgtggtttgtatttcctgaatgaatctggagtaatacaatgtctgaggaaaaacctttggtggaacccacagctatgggaagataaattttctatggtgtgaagacactttatttctaatatttggtaatgtcaatatatgattgacaaagaaatataccttccccatcctgcctcattcttgttacccagatgtgggtcatcttttgcccaaagccagtgtttaaagctcatctaactactattttattccattctccaaatcagattcaaaactaaaatacagtagcaaaaataaaaattgttctggacactacacaggaaactaaagaaaataatttgtattatattaccacacagcataattttctaaagacctattttagttatttttattcttttttgaaatttcttcctaagtctatcctaccttacctcttttcttcttctacatctctaatgtctctctctctctcttttttaaaagattattgtcttctccattagatccagccttcagtttgcatatctcactcagtagaacatggcaggtagccatcctgtgggagggtgtaactctcccatcccatgtggcttatgaagttattgattgaacaaaaatgtagctgatttgggttgaaagaagggggttaaattacatagctaaaaaaaagaataaaatattttgttatgcctctttctcaaatgaaatgagagattttgtccttttttttttggtaaacacatgtaaaacaatgtaataatgtggagaacatgctaagctacagtgaagaaaatttatttttcctagacatggcagtaaatggaaatttctttatcaagggcaaaataatcctagtagttaaacaggaagaagaaaatgaaaaggacttcaggggattaaggagggagttactgatttcaaaactgcagtttcggagttcaaagtgttgatcatcaaaaacggaaaatgtgattttgaagtgaggaaaccccaaaagaaagttaaatgataattcagtggtgagagtcacatcggagcagtgtctataattcttatgagtgctccttggaaaagaaaatggaggaagaggtcctgtgggagaggcagttatgtgtaaagaaactttagaggcttggagaggcgtttctcagaaatctgcccagcctttccattctacatgcaatagagagaaatgcagtggggtgatgagggaggcttctaacacgccaggacaacaatccagtgactcccagggaagcataatcttttgtcttataattttttaaactgcagatatagtacatgagtggtatgagaaattaccacaacacaaagttgtgtgaactgtgaaagttccccttacgaatgaagacaaaactaactttccaacagttcttcagaacatatggccttatattttctgtttggaaaacagtgtactctactgctatcagatctttgagccagaagctggccttggaggaaacctgtggcctttcactgcatgggtccctccaagtctaataagagtctcagaggcagagctggcaagggctaagaacactgcaaatagaaatggaccacaaaaataggaaagtcatttaaaaaatgaagttggattatgcacacggacgtgtccttaaaaataaactctgttaagtaatgaaggctttgcatggggactgtgtacataaaatcacagtagactgttgaggtcatgttagagcgcttatataactctcgggtaagttttgatgaagggatttgtgccttgcagtgagaagatgagatcagttagtaaaggagaaaatgaattgatttattctgtagaagtagggaacttgttaaaaaaatggagaaactaagaaattattgaaaactatgatttcttcaagatgtctggaaatcctatagtttagatggcatacaaatagaaagtggttagactgagctagtcagaataaatgagtatctctaggactaagacttttgtatttgtgccccatcaacaaattgacattttaaattgacttttaaaagtgagactaaataatatgaagatagaaaatattttattttttaaagacattttaaaatttgatttcaaaactaaagtcactttccatgaaagataaatagtggtgttacagcaaaataataaattaaataagatttataggggaaaagagataatttatttatagagataaatttagcaatttatcttattaagacaaatgttcttatataaatattcttgaagccctccctactcctaagcttccatttgtgaattttttaaagactttattagtcagatattctgttccttgcaacttcctaagagatgtgttcacatttataccttttttttttaacttaaacgcttattttattagggtgaatttataaaagctaagttgttgtttaaaatggcatatgacatatacagtttaataaaaattcacaaattgtaaagcattaaacaaaataagagactgaaactggcaagaataagtactaaacaaacactattggataacataaaggattaataatttgtttgcctttttcttttctctggacctgccctgatctctcatcttctgtgtatctcacacttcctgttaagtcttggaaccttccctctatctggggtgggaagctgaataggtaggtattgatggtggtaattaagtggagcagaaaagtatttcagagggaacagggaaaacttaatctcattttgttcaaggcggaagcccaagatgttttagttggggtagatataaggctacctatttacacaaagagagctatatatgaaattaatttagattatacacaaacataaaaacaattcaatgagaacaaaggaaataagacagaaaaggttagttgtgatcaaatatttgagaatgttgaatgcaaggctaagaaattttggctgcattttaggggcagtgataaggcagtattaagagctcagcttttctctacaaacatgccatccatacttacaaaaggatagaaaattgctaatgggcacgtatacctttcagtactctcctcctctgaaatatttattatggactgcatgtttgtgccccacttcccaaattcgtatattaaaaatttaacctccaatgggatggtgttgaggtggagtctttgggaggtaattaggtttagataaggtctagagggtggcccccatgatgggattaatgtaccaatttgtaagaagagaaaaaggactagaactggctctcttggccatgagtggatgcaactagaagatggccattaggaaacgtggaagctatcctcaccagacaccagactacctggtgtcttgatcttggacttcacaggctccactgcaagaaataagtgtctgttgtgcaagccacccagtctgcgatatttttgttatagctgactgagctgcctaagacagtacccttccttcaccttatcactgaaccacaaataaactcccatttccaactgcctccacctgtaccgttctgttttctgatcccagtgtgtcttttcctttgtctcattccagataaccatgagagtcacgtgcagggtcttctgctccaagccctcctttcaatgccacacagaacaatgaagatttgagggacgactcgtggaagaactaaagccagagtctgtgatgcactcttcaaacaggactgaagagaatagataatatatctgtagccatttatgacctcaaggcacaatatctattttctgcaaacttatctgaatttgtacctttttgtttctgtttgtagtttaaattagtacatcatgtgggctgggatttgggggaacttgtggtgaaaaagggacacagattgtctccagagaccaggcctgctatagcaaatttctagttggaaaacaagaaagatcttggaggaaaggaatatacaggtaggtgaaaccttggaaaacacaggaaacctgtgaattttaaatatttctgcatctacaggtttctgctacctagcttcccagagtttcagacagattgaagaaaaaggaaagaaagaccattctgttctatcagcagcaatccactgggaatgcccacttgggctttatcttagctttactgtgaatcttttgaatgattttgggcaattaagtttaattttctgcattttagtgtcattatatcttgtaaggtatgaatgcatgatgtaccataaaagttcatgttttcaattaattgatttttatttttagagatagggacttgtgtctcctaggctgaagtgcagtggcacaatcaaagctcactgcagcctcaaactcctgggctcaagtaatcttctcaccttagtctttcaagtagctggaactacaggcatgcaccaccatgcccagataattttttaattttttgtagaggcagtgttgtccaggctgatctcttaactgttgcccaggctgatctcaaactcctgacctcaagtgatcctcccaacctggcttctcaaggagtttggattacaggcatgagccaccacacctggccccagaaatgcaagttaaaatacatactgtggccaaatcttaaaacaaaatttatctgacatatttttagagttcttgattttgtaaaaaaacaaaatgtggtggtaacagtgacctctaagcttgttcacctttttattctcaatgtatcacatagagtttggcatatagttggtgatcagtaaacttatattgattaggttgaattaatgactaaataactgcattagtccattctcacactgctataaagacatgcctgcaactgagtaatttataaagaaaagaagtttaggcagctcatgattctgcaggctgtacaggcttctgcttcttgggaggcctcaggaaacttataatcatggtagaagggaaagcaaacacatcttcatgtggatggcaggattaggggggtgcacccacttgaaacaagctggttttgggagaactctatcacaagaacagcaagggggaagcctgcccccacgattcaatcacctcccaccaggccccacctccaatactgggaattacaattcgacatgagacttgggtggggacacacagccaaaccacatcaataacctttcacattttctcaatataatagtttggccctatgtccaccttcttaacagctagtttcaagagaaagttaatcaatgccgacagggaccattcttgaaaagacgtggtacaagacagtatatttttatttagatactgtgttttggcatagaaagaaggtaaagttgatgaataggatatggaacatgaagagataaaggtgtttagttggcagcaatggtctgctgaatccatttcacgtagttgcaaactttagtgtagactccaggtttgttcttctgaggacaaccatagccccaggagacaatgccctggagttctccgttgcagaccacaggaacaccagagtcaccctgggcaaaaaggaagggatattcagagatcttatttatgcccagatgggagaatgggccgtaagatgttcttccattgtgctggagccattgtcccacactgctgatccagcatgaagcactttctcttcctcttgaaaccctccaaccctcaatctacttactatatcagtagttagtcttccttataccttatttgagccccttctctttccttggtaggccaagtgggccaagaggaggtttcatgctgcttaactagctctgctccttccgctagagttcctttccacagtttacctcctcagaagggcacttagaaatactatttgcacaccatcttctgtgcatcttttaactcttaaacctagacattaatacaataaaaataaaatatttaatttgtcccaaggctatccctcacctctcacaatcagttatagggactgttttacaatcttctgtgtttctgaaaaggggaattatggtggagaagactaagaataagctggaattgagaagcagtacaaagaaactaacctggcaagagtcctttcaaccctccaggaatcccagacatatcatgtttgtagtaatcttgcctgggtaggctgtgcggcaagcagtgttagagagaatgggagccttcagacactgcaggagatcagggtagttggccgtggagtggaagagtgaaaaatgcaagattactcatgaggtttccaaaattttctttctcaatacatctcccctcttccccaatactctcactttttctttcaattagccaacggcttctcatttgagagaacaatactttcttttctagaagctttcccaaatagttctaatcaatgaattgttccaattcattccaattgaatgctccaagcaagaccaaatccctgagtctttgttttgtttacctcctcagtttatagttctctgcccatcactaatcacacttcagttaaataccctgatatcttcatagtacttcattattatgtcttctgcatggttccagcaaaggaatcttcttcatttcaattattaatagtatatttctgagattccatgtatccaaaaactatgctctgggaacttaaccttaagtgagtttggactagctgactttccacatgtctttcagctctaaaattgtcacacttggtacttctgtttcaggcgacactaaagccactgctcagggtgttgtcccagccagagatgaggcactgagtaccagccgctgcacaggatcttggcagagagatggtggccacttgagagttgatggtggcgactgagctcagcttaatcagcatgatgtcattatcaatggtggctgagttatacttggggtggcaaataatcttggctgcatttatgaattgttcattgccttcatagaccttaatgttgtattctccaagatgcacatggattcggctggattaaaagatataagaggttcctaagtatctagcttgagttatttccactcctcctgaccccccatttatgagcataaacacagacaccatccttttcaagcaatcggtcatacagtaattgtgcacttaaggtagcattctgcaccaccacatggtacaggttagagttttccttagagaagtgtcactgcaagtgcagactcactgcccgccatcttgttagaatagtaaggaatgggaatgagaactcaaggacttgaataaaacagttggagataaaaaggaagttggtggagattgatcagcatttgccatttctctctggttgggatcaccagttatcacagggaatgaagcaggagtcagagaaatggcagaatgttaagggaacagaatgaatcatgcatatttttaatgtgcactgtaaattctctgtattttattacttccatatacagtttatactggctgagctacagtaattagcactatgtactgattcatgtcataagctatttctagggatagttcatcactcactatttcccttccatatcttgaataccatcatttgggaagacatcagggaaccctgaagggtacctctccatgcaaatccccctttatacatcagataatgcctgagaaaataagaagtctctggaggtctgaatgcctcaccctcaagcacaactctgcagtttactctggattgtgttttgtcagggatagaggattaattaatcttagtgcataagaaaatgagtatcaatgaattacgacttatagcagtgagccgtggacacctcccatttgttattgatgagggagccaccacagaagtgatagccagcattcagggaccctgataggggacagcattcgtctgacaggtgtagccccccaacgatcttgtcatcatcatcactagtggggaaagtggctgacagaggaaagttgggaactatcagttaaacagattcatcttaaagtttctacaataccatgaaaagttttctcagatttaccaaaagagcagaacgttctcttgtctcacataatcaggaaatggtggctttaaggtaatttgggggggaaatttattatcccatacctttaaattgtaccccacttataacattataactatctattttttaatttatgctttaactttgataaatgcattctttttttaatatatgtactattcagacacacacacacacgagcgcgcgcacacacacactcaaagatcagaaactcttgacacagtaaatgtcctgaatatcacttcctgaagacacaaggaaacttttttcacagaactctgctccgcgccatacaattaggtgtaatgcttttcagtagtcatgctgatgttggtttgtggtcgttggtaggatgttggtatgggagagagagccccatacagtaacagaaaggaagctttaaaaaggcacctgaggctggttgcggtggcttatgcctgtaatcccagcactttgggaggccgaggcaggcggatcacgaggtcaggagatcgagaccatcctggctaacacggtgaaaccccgtctctactaaaaatacaaaaaattagctgggcgtggtggcgggcgcctgtagtcccagctactcgggaggctgaggcggagcatggcatgaacctgggaggcggagcttgcagtgagccaagatggcaccactgactccggcctgggcgacagggcgagactctgtctcataaaaaaacaaaaaaaaaactaaggcacctgagaattttctcgtctggaaggaaattagagatttatatttttgctctcctaatttctcttcttgattccagtctagaatttttattaaaatcattttacagagtattataggatgaccctcttcagcctttcctcttatcccaattatctttccaacacttacgaatttattcagcttttaaagtctagcccactttatatcttgtagctccaaaagtttgtgattatattttatgagccccattgttcagatatttttgatagttttaggaaagaagttagcaggtgtgtagacagatgaattgaatttatacctgcctaacttgagaaaatttagtattaagttttagtcttataaaatttagtagtataaaaggaaaactcatcatttttctattatattcatgatgaaatgacatgttactttacaccagagagatatccatggcaaaaatatcgtaaaacacagcccatagcttttattcatgagaaagaaaattgcttttccctttggctttatatcactagccctttagtgtggagaagatgcaggctctgacacctgcagcctctttaagagcacacgattagtttcaattattaactccaaattcttggaaaggtcaggataagcgcctccttaatctgggctatcttttccttctctctccttcttccttaatattacccagaagttgagagcaagtcctgtgtctttatatcttctaccctgatcacttttgctcactgtgaacttcctccaacaagtgaaatttaattatccacaaacatatgtattttgcactgttgtttcaatattttaagcttcttgaatacagagaacagattcaacattcattgttgtcttccagagtataaagtacaaacttaagtttatgttcgacatccgctgattcactcattaaaagatactcaccagcagctcccaggagagcaggaagatgaaggtcttcgtggttgctcacttcacctggacttggaaataggatgacacttttcttccacagccatttataccaacggacttgtcttgacattctggccacaggggccagaaaagtgatttcactggaaactcacaaatctaaatctaaattctgtgacagatgcaagataactcaacataaattctaaacattaacatttgcctacttttctagagggtcatgggactgaaagtaataagcccacctggtagaaactgtaccccataataggtaagtaaggcggagtaaggtcacaggacagagttacaggtgtccagattcccagataaaaaatcttaagtagttgggcatctcaactgtatatgtttattctaagaacgactgcacttttgaagtttcataatgtagactcttttacaattatatactttgtcttttgactgctctggtcttatatatccatgttagcttttctctttttaaaatttcaactcttattacaaattaaagggtacatatgcaggttttttgcataagtaaattacgtgacacccaggcttggggtcccaacaacctcatcacccaggcagtaagcatagtacccaacaggtggtacttcaccttctcattgttaaaggaacagcttgtttcccttagaaaaagaagattgctattaattgaacttataatagagaaaaggaggaaagttaaaaaatgctaataacttataattttcttgagcttataattatcttgagcttactgtacttattctaagtacttattgaataagtcagtaagtatgtagaatactgacatacacgtatgtcagggatattttaagtatttgcccatattaatttagtaatcttcacaacaaccatataagatacctattataattcccactttacagatgtggaaactaaggcacacaaaactgtaggggatttgaccaaaatcacatagcaaatacacggtaacatcagcattccaacccagaaaaatcttccttcagagtctgtggtcctgaccactatgaaacacttctctcagtaagttcaccaaaatctggatgccaagataatgcaaaattcttggacaatgataacatagctgaaatttttaaagtatttactatgtgtccagcactgtggaagtggattacgtgcatcaactcattcagtcttcacaagcagcatcgtaagtgttaaactacaaatttcaccatttaagagatgtggagaaagaggctaaaagaagtcaagtgagtatatcaaagtttcatagctgttaagtggccaatctatggttaaaacttaagcagcctcacttcagggttcatgccctcaacagtgatgccgtgaatataataagagagaacagggctgggcgcagtggctcaagcctataatcccagcactttgggaggccgaggtgggcagatcacgaggtcaggagatcaagaccatcctggccaacatggtgaaaccccgtctctactaaaatacaaaaaaaaatagccaggcatggtggcgggcacctgtagtcccagctaatcagaaggctgaggcagcagaatcgcttgaacctggggagtggaggttgcagtgagccgagatcacaccaaccaactttatcgatattccaagacctctgggaaacagcaagagtatgataggagacatccagacattcatcaggaggattcttcatttttcaagtatggcaaatattgttgctgaagttattcataaacatgccttcagagggaagtatgggatttacagacctcatctggttaaggactactcttgactttcttgatttaatagagttttactgtgatgacacaaagcactgttaaacagagctgcgttactcgaagaatgaaatactttcaatacaaccaatggataaattcttctctcactgtgcacattacctctcttggcctttttataatctaatttcttatcattcataatcagtccctcaaatactgactctcacctgagctcttctcagatccaacttctactgaacatgtctgctcccatacctagggtcagctagtctagcgctgaattcatcatagctttctctttctatattttctgtcagtgcaatgaagctacacacatatggttagccaaacttgaaacacagaagtcacccttaacttttttttttttttgactgagtttcactcttatcacccaggctggagtgcaaatgatgcgatctcggcccactgcaacctcctcctcctgggttcaagcgattctcctgccttagcctcccaagtaactgggattacaggcgtgtgccaccatgccgggttatttttgtatttttagtagagatgggattttgccatgttggccaggctggtctcgaactcctgacctcaggtgatccacctgccttgggcttccaaagtgctgggattataggcctaagctaccacacctggcccacccttaacttctttatccaccttgcttactacctgtattcaaagtcttgacgattttacctgtcttaaagatccttgacttttctttgaagatccttgattttcctttcaagtcaaccacctatgacttggttcagtatcacattttctctcctgaattattgaaatcgtgctaaaaccacttccttgtttgtggctttattctccttcaactcactctccacatcagagtaatctttctaaaatgcacatggatcattacattttccgcttaaaatgctttggtggctccacattgacatcaggataagtttaaattccagcaccaaagttcatgttcttggacactgtatgctgttttaaacctctgtgccttcccacacaccttacctggttaactcccatcattcttcaactctaatcgtggagaactctgaactccacctgcattctccaactaaagtcaggccttcctgaactttctaggcagctttactttcattacatttacttccagtcacatattacttgtataaatatctgcttaatgtctattttttccaggttgtttaaaattcctgagggcataaatgatgtctgatttgctcactattacacttcaaagccggtatgtacgtggcacatagtaattgctcagtgaataactgctgaatgaatgaatgaggttactttccctctttgctggtgaacttctagtcatccattaaatttacctgaagtatcatctctatctataattaatctctgacattaacctatgacctcccctaactctactgccataatgccccaattggttagatgctaatccgttctatttcttatcggtgccattttgaaaccctgtgcatgttgctattataacttttgaattttgttgcaggctttgatttccttttctcttcaactagaatatgagcttctgaagaaaatattgtatgttaaaatttccagtttatgacactgtctctggcatagagtagatgcttaagttcttctgttcttctttgccccattgggcacttaagccttgtccaaaacatcttcaccaacagtcatccagcctctattctggacaggaaaccacaggaccttctggaaacttcttccttctgtcgagctggaaaatcgtcttgttagagctttgactctttttctctctgtcctatagcttggggacataggatcaggagagagatagtaagaagataagtagacaacaaagcgaaaagaagattgtaggttctaaaatagttaaagatgagtcagataagtgaaaactccagcccagcaaatatacatttttctctttaggtagcagttacaaattgtgaaaggaaatcaaaaaagtgtctccctgttactgggaaatagcatgccaggtagtagtagtcaaagctaatgctggcttctttgtagacaattcagcagaaatagtttcttagaaaaaaaatacttggaacaggattagatagattgccctaacatctggcttagagtactctccttcaaaaaaccttctccaattgcatcaatccccaactgataattggttttctatatagtctatgaatgctgatgagaatagtttgggcccgattatttgatggtcagtcaaatatcatatagtgattttaaaaagttatttcttctcaatattggctcagtcacaccatctagaatattcacacacactgaaaaccaagatgaataacctgtagtttttttttatttgtatggatttatttccccctttcacatggtacccattgcaatcagggtccttctatatatttgtaaacccggacaaatcaagtacaaacaagctcattagctgcaaccaccaccctgtacactaagaagatcttcctgaaaggtcctgaggtcttccctgatcatcgcccatgtcagatgcctcaagttatgcaataaacacacagcgacatgaaatacagaggactaacgtgcatttctttgtatctgtgtagaagggaggcctgttggaaggtgacagagaccatgcagcatgtggaaggtgtctccccaaaagtggggtggagtcaaaaggggatgaggaaagcagcctcctgcagattgtggaagccccagcagactgcaaagggcacccgtggggcaaggcatccctcgtgtggtgtgtcagaaattggactgaggtgaggagagtttcaacatgggtggtctccatggcacaggaagtcagaacttgaacggagagaggtggccatttacaaaggagagatgatggcagccacagcacacatttagttacctgtaaagggactaatcaaatatgtaaatctataaggataacagaaccatgtttctcagttattggataagagagttgcaaatatggaaagagaaaacactagaacacaagaacataagaataaaccttataatacgggattggaactagtgtgaactcatcgcttctcaatatgtatagacaggaattaaagatatctgtaaatatatgtgtactgtgaaaacatatgtgtatgtacagctctgtccactgtgatacctaagagtagttccccccaaaagcaccccaaaagatctagtatccatattctgttttctaaataccactgtccactagaaggaaccaggactttttggacatatagtagatacaaagacaggcaggaaaagcctagaaccccttgtgccataaagtaaggaaatgctgaaagaatgatggggaccctgacaggaaggagaatttaagaattaacaacccctctatttccgtatcatctttgcacaatgcttcatcaacattgaaagattattattcataaataaaacctttgaaataaaaattgtttttatcagttacattccagccttacatactgagactatgacccgatttctgtagatttgcagatacaaatataccaatgccaaccatagcagattagaaatacaatttttaagtgcttagacctaccttttacatatgatttttactgttttccattccatctatctattcattgaccaactaagcaaatatgtattaagcacccgcactctgtaaagtattttgacagtggccatgaaccatgtaagcttctggcacagcagcctagtgaagtctaccctgcttggcttacattgtttcggagctgggtagacagttggggaaaattatttcagcctctccccacaaccagatttcaagattgaggcaataagaaggtcagtagatgaaatgatttaggcacctaaaaccctttaaccctcctaaagcataccctgtaaaactttccaaattagatgttatctctaaacatgtcaaacatgtctttctttttttaagatggagtctcagtctgtcatccaggatggagtgcagtggcacaatcttggctcactgcaacctctgcctcccgagttcaagcgattctcctgcctctgcctcctgagtagctgggacttcaggtgcacgccaccacccctggctaatttttttgtatttttagtagagatgaggtttcaccatattggctaggctggtctgaaactcctgacctcgtgatccgcccacctcggcctcccagagtgctaggattacaggcgtgagccaccatgcccagcccacgtcaaacatgtcttatagctcctgtaatccctgaagcactttgagaatgtgaatattattcacaaaagctgtttgaacaaattaaaatggcccatgtgcccatgagagttggttttattcactgttatattcctggtcctcaaacagtgcctgacatatagttatgtgttccataaatacctattggataatattattttgatatcttaagtgtgtatatggaggttgttggaggcatttcaccagtaggtggtagttagagttgctaaacctttacttcggcgtttcaaatgccttcttgttttgtgcattccctgcggaatccctttgtattctattctctcaatgctgtatcaggaggactgagggcagatggctgacatgagggcaatgtgcctctttcacctccaggaggagctacgactttagtgaaattcctgagtcatgtggagggagaagagaggcaggagggaggaaaggactaacgaaggaatcaaatgctctggtatcagggtttgctccttgttgtagttgagagaccatgtgtggacaacttgaagacactaaagtccattccacctggacctgcatctctgcagtccctctgctcatgcccttagggcctcctgttattctagtctgtgttcaggtcctgcatcctaagtaggtgagatgctccctgggggtaggggtcgcagattatttctctcatgtcccctcgagcacccactgaaaggtgcttcctccctagttggcattaccttactgggtcttaaaatgatgcacagctggctccagggaagggctccactgagctaggtgaggtgtcctcctggaattcactgagatgagggaggggagctggagtgtgctcatcctgggtccaagacaggcatcgggaaggcatctgcccaaagggaaggggtctgtgtgttagggaggaggggagccataagtagaaagaggaaggggagacccattcattcgttgtgggaagggcaggcagctgctaagaaaaaagcaactgtctaaagaacccgccctgcacacctggccctgagaagctagtctaaacccacctcttgaggtgccagtgccaagcttggaaaggaaagaggaagtgtgagctgtagacactaatagtgacaccaacaggagcagagacttcccaagcagcccctgtctcagggccagggaagcacacccagacgacaaggacacagagcagggagacacagggtccccctgcctgtgccccgggtgaccctgccatgggctgaagtctccactgtggtgtggtccattgtctcaggtgagtcctgggcacaggtgggacatttctgtccttaaattttttgcttttttcatggaactgcttcagaagattctgtcctaggcttagtctgaatttggcttcttattttcataggctccatggatactggaattacccagacaccaaaatacctggtcacagcaatggggagtaaaaggacaatgaaacgtgagcatctgggacatgattctatgtattggtacagacagaaagctaagaaatccctggagttcatgttttactacaactgtaaggaattcattgaaaacaagactgtgccaaatcacttcacacctgaatgccctgacagctctcgcttataccttcatgtggtcgcactgcagcaagaagactcagctgcgtatctctgcaccagcagccaagacacagccctgcagagtcaccgcctccctgtgcacaaacctcctggatctaatcagaaaaccgtgggggcaacgcatccagctgagcctcagcactcggttcagcattctgtaagacctcagcagacatctcagatcataatactgtcatttattggatgtggcaatgctaaattgcccagactcctgcagcctgtggcctgagtttgtcttgaatgagactgtgcctgaacttgaatgtaggacagatgccgtcaagtttaagtttttccaagtatctttcagtcggtttgtgcctctgggaaatgttgtgtgaggtatttaacactctggcctcaccaatccaccttccaatatggactgttttttgactttcttttgactcaagttagacccggatctcagccctcatcccagctccaaatatgtatggtcagaccttttcttttcttttcctttctttttttttttttttcttttctttccctcccttcctccctccctccctcctttctttctctctctctctctctttctttctttctttctttctttctttctttctttctttgtttctttgtttctttctttccttctttcttttttgagacagagtctcactgtctggagtgcagtggcgcgatcttggctcacttccacctccatcttccagattcaagcgattctcctgcctcagcctcccgggtagctggaactacaggcgcccagcaccacgactggctaatttttgtatttttagtagagacagggtttcaccatgttggccaggatggtctcaatctcttaacttcttgatttgcccccctcgggctcccaaagtgctgggattacaggcgtgagccaccgcgcccggcaggtccttttctttttctttctttcttttttttttgaaaaactaaagaatacccaatcccctcctcaggtggctctatcactgcctcaccctgaggacagtatttccccatggggtttggatcactgttctctagttccctctccctggggcatgtgcagagtttcaacttcttgttggctgctctcttccactcaggatttaaaacattcacacttgattctttttccttctatctctgtaatcctaataccaagttttcttggcattcattatcagccgtggaatctgttgtacctgaattgttactcacagcaggtaataagagaacaagacctcctggaatttctgagccagactttgtactcagggttaccttgctgacccccatattttccagcattgctcttattaattaatggccctcagtcctgcacacaccatcagatcccaggggctgagcacagcctgcattgtcaggttctgcaacaacacaaaggctccctcctctctcctatagagggcgctccagggatggtgggtgttgccagagacaccagtaattctgccagaccttgcctgtggggccatgggagctcaaaatgcccctcctttcctccacaggaccagatgcctgagctaggaaaggcctcattcctgctgtgatcctgccatggatacctggctcgtatgctgggcaatttttagtctcttgaaagcaggtcgatgcttagactctaggaaattcttgctttgaacttacctaagacaattctaaaccattctcttaatcttcttcttttctcacaggactcacagaacctgaagtcacccagactcccagccatcaggtcacacagatgggacaggaagtgatcttgcgctgtgtccccatctctaatcacttatacttctattggtacagacaaatcttggggcagaaagtcgagtttctggtttccttttataataatgaaatctcagagaagtctgaaatattcgatgatcaattctcagttgaaaggcctgatggatcaaatttcactctgaagatccggtccacaaagctggaggactcagccatgtacttctgtgccagcagtgaagccacagccttgcaaagacaactccagcctgtgcaaaatccctcacagagctgcctccctcccagccgccagctcccacttcctgcctaagaaaaggaagtctctggttgggtttgttcttgcagctgtctccaaatagacagatatctgaaattaaattaccaaaggtatcttgggcagaaatgaccagacactgtaggatttgaagaatgtttacagatactacagagtgtgagtgtgatggtgggctctgaatatgagagaattgtacacaaccaagtaacttatatcttctcctcattcccatttggccatctttattagaattgttttgttttagttgcttaggaaaacatattttaacttctagggtggcgagatgattcctgagtgggagttcaggtatttccatgagaatatagagggtgctcacagaaatcttcagaagaaggggcttggtacaaagaactcaattatcaatgactcttgctcagcatgtggtcaagagcagaactatctgatgaccctgtgaacctggtgtgatgcatttgggctaatgatgctagctcacaaaataacaagttaagagagtagaaaacatggagtctaatatttcacaccatttcaaggtcaacagagttctagaccagcatgagaatcgccagaataaagcaaggcagtgcaggaacagaattcagcagcaaaagtcaagagacacctagaggcagaggcaggaatgaatttgtcactttcaacttaacctgaagcagccagattaacttcttgagtttcatttaagaaattattcctcttttaaacatacctattgaagtctaaattttaggtattttatatatttcagttctggaatttccatttaaatcttgctacaatttccagttgtttgctaaaattgcacattttgtcatttactttgttgactatattaacatctgtcattttaaagccactttttgataactttaacatctgaatctgtttgggtctatttcttttgtctgttttctctgttcagtttctgggcacgtgattttgttttctcatacaactagtaatttacttgaatgccggatattgtatataaaaactatagagataatttgaggctctgaatgatttcatcttcctcaaatgattcacttttgcttctgctgggattgtagcaggggcggatcaccttaattgagctgatgaatgagctggatcagacctgagcttcagcctgcatgatggctgctcgcctttgctcttagccatgtaagttccaactagatgtctgaagtttaacagctaaatcaaattgtaaattacataacataatatttgcccattgcaagcatgcaattcaatgaattttgataaatttgtggagttgtgcaacaatcaccatgatccagctctaaaacatttcatctttccccacccggaaagttccttcgtgctcattttcagtcaatccctgcttctacccccagcaccaaggactggggtctttgccaggctcctctcctattcagtagtcactgaacgtaaatgttctccagaccagaaaggtggtggatgctcctcaaagcctgctacactctcagtcttcccttttcttctcagctacttagccaacgatataaaactggcaaatgacttaaggcgaaagtggtctgttagatctctcctttctcgttgagatcccaatcccttaagttcttactgcctcagtagctccaagtgccttcaaacgtttatttttatattttgttaagtttttctagttgtttttggtgggagtgttgttctgcaaaaaatcagtctattaactctgaaagccagtttctatatttattaaaggtgaggtgcaatgttttatgtttttattttaggtagaagtatcttgaagaaaggaaggagtgaacctctctgccttcccttttttttttctttttgagacagattctcactctgtcacccaggctggagtgcagtggggcgatctcagctcactgtaacctctgcctccggggttcaagcgattctcctgcctcagcctccggagtagctgggattacaggcgtgcaccaccacacccagctaatttttgtatttttagtagagatggggtttcaccatgttggccaggatagtcttggcctcttgacctcatgattcgcccgcctcggcctcccaaagtgttgggattacaggcatgagcctccattcccggccagattatctctatttctaagagttctattagccttctgcctttggtccaccatgggacagagtcttgacacgtttgaccttttaccacaaggaggagctgtgactctactgagattaagggaactcagaggaagggcagagcattctcaggatgggagacagttaaaagaaatattgggtttatttacaacaggggaaaatgtggtctgcagaagctgtgttaatgctgaaatgtgagaggataaatatagactattcatttgccttgctgtgcaggtgcttttgatctagcaaagagcctagactgccagatttgttgcatgtgaacctgcatgggatgagaaagggagagaatttgagctgggaaagagcagagctcacaagcagatgccagtggaggaactcttcctgagaggaataagagaggctctggatgctgggcctcttctccagttcaatcctgccatgaaatgacttcctggaacctgggcagtgagcctgacaaatcagggcttccttgagggatcttgcaaagagagtaattaccaagggaaatctacctatcagaccaaagaatacctggagcaccattctcctgactctaaatgatgaaaaacctaagctagaaagggtttttttttttctttttcctcttctgaatgttcctctaagttcttggagtgagggcttcttcgaaggataggaaacctgtctcctgggtctgagctaatggttctatcaaaacagcctcaccagactcccttccagcttccagcttcaatatctatccctgtctaccaagacccatggaagctagacttgtccagatatcaaaagatgatgccaaacacctggagatgggaaagaaggtggcgtggacagacctccaggatgcacatctgaaacaggctcttcattttgttttgactacagcctcctgtttcgccttttcaaaaagcatttggaatttcccttacttcttggaaatccaaaaatacagcaaagatacattttctataggctctagttattcagtaggagggagcttcagaatatctctatactctactatgcatattctagcatgctgcccggaagtgaaagtctagccaaacagtttaacaggaaaaccgttagctgtcctgtggaggttaattttgcagtttattttggaatggaacaaaagaaggtattgaagataggaatctcatttctatatgctagaatctaaatttcttaactttctgtagtatgggccattttcaaatcagctaaagtcctaaaaccagactatgggaaacacacacttctaagctcaatattaaatatctaaagtgactaactaacgtagggttggagaggcagggtccccctggacttttcaaactcctaccctcacaaaaaatctagaacttcttctcagtaacaaaaataagatgacgtataatcatttttcattgttaataaataatctctatccatcatggcattgcattgaatttgtgttaattgttgctaaaaaatgactgtgggttaaacatttgtgattcatataataatagaaataataaatgtaaatgttttaagtgaacaagtgagattttaatagctcaacaggcaaatagcatgaactgatgctctgcaaaggtgagggacacctggcctgagacaggatgtcttatctgattttggtctgaatttcatttggaaaactggcagctgctggtcaacctgcagggatatgatcccatgagctgatatgcaatgttgacttttgtatttttgtcagcatgaaataatttttttttttttaaatcagggtcagagtctcgagtaactagcagccagctgatagaatggaagtgaaaccatggccctcgtccccttgcaaacctggaaacccagtgttgagcatgtgtgaagagagaaacagaatcaggtgaaatgaaatcttcctaagaccctgctcaggaaactaaatttgacgtaattggacacaagaagttgttcatccattctattccgccagaggagacaggacagatttcccgtgcgttcttgggaagctggaagagggagacagctctgccaggtggagtgatattctcatgagaagtgaaaaagaagaggcagagatggagagtttggttctagaagggtggaaggttttgcttataaacatatcaacacacttgcttttcccgccaagatgcaaactttggggaattgctcaaatataagatggggtttaaatattggacagccaaaaatatgacccatgttcaaaatatgcatcctggtatcattcagttcgacgtgttctagttcttctgcagctttctgtctcattccttttgcccctacaactctccacctttttgtggattaagttatctccatgataaaattattatgttgtcttccctctttgactttcttgtcggcagcctggctcttcccagggatcccagcgtctatcctctctcctttctgtagcttttttccgcttctccagtatggcgggccctgtcagaaaatacgtacataatcaatttatttgtccttcttatcctttggacaattcttttgtttgtttgtttgtttgtttttggttgagaccaagtctcgctctgtagtccaggctggagtgcagaggcaggatctcggctcactgcaagctccgcctcccggcttcaggcctgcctccgccttcctagtagctgggactacaggcgcccgctccacgcccagctaattttttttttttttgtatttttagtagagacgggtttccccgttttagccaggatggtctcgatctcctgacctcgtgatccgcccaccttggcctcccaaagtgttgggtttacaggcgtgagccactgcacccggtctagacaattcttgatggacaatcaaacacttttgcttttcatatctcctgtaaaacacaaaacaaaacaacaaccagaactaacattgcctcatatgaggcgagtttctttctatcagtttcattccagtgcctctcccagacgctgtccgtctgatttggtaaaaagtcttgcgtaaaatagtgaaatacatatttatttaaagtctactctttaagaatggttacatctttacatagttatgatcatcaccattgaatgtagcctcttgtcatttcactatcttccctccccacccgttccttctttgaaaaggttcccatgtcagctgtgtggtgcaatgtggtaggtactgaataagacccacaactacgggggtacctggttatgttcacagaattgtagagctagacagagtgttgaaaattatttatttctgcccattgtttcatagatcaggaaatgggatgctttaaaaaaagtatttaaatgtaaatagtaactattttgctggcctccatgtaatatgtatttcatattcttagtctacaagtaatgtgtgaatgtgtttttgctcctattggattataagcatcatgagagtgagaatattgtttactcatgctttgcactaagtagccattcagtgactataaacaaataaagcatgcttgaagttccaagaaggatggtggtcatttttcttttgtttagttcaagttctgtgtttagtaaatcacaaatgaaccatcaaggtctgtctttgcaggggattcaccagtagatgacaacactaccaaagtgtgtgtgtgtgtgtgtgtgtgtgtgtgtgtgtgtgtgtgatacctttctggcagtgctggtctctggttttcctcctggaggttcctgccctggggccattgactgaggcactgaggtctgagtgctggaccttgctgacaagagcaggaggagctgcagccctgccacacccccgaggttgggtggttgatggctggcagaggagaggagtaccatgggcaagaataaaggggactgtggtcctcaacattagataattcacaaaacgcgaaggcattttctgtcgtcacattgccatcaggtgggtagggcccaaggatgccgccaagcatcctccctacacaggacagctccccacaacaaacaatcacctgatccaacatggcagtagtgctgaaattgagaaaccccgcaataagcttcggttgtaaactttgtaccaagaaggagaattctctgcagacaactcaaggggcaataccgtcaactacttttgttttctctgactgccgtgttgttgaccttcatcgccattctttcccagcacatggtgtctgcatattttccagcagcctcctgtttcctcataaatctgccccttggacagataagaacatcacagggagcagggctgcagttcactcccaataataacgcctcagcagggtttgctctgcagtagcatcacagtcatgtggagtaggtggctatggctggtattcaggtgaaatctcaggccaatctctcctgaatcaaggggaccactgatcattaatgagaccttcaagtgagcaaagattcaagagagcaaattaatgtcctgcgctattgtgaagggacgcaaaggatccagagaggaaaccagctgactctgagagaagggcctgaaaaggagaggaagggaggaggtggtcagatccccgggaaggagcagggagggagggggctgctggcccaggaatgactgtcagagacacatcctggaggtcacaattccaccctctcaattattcccagaaattccaaaaactcctttaaaggagcaagtgcagggcatgaaagggaggagccatgctagaggagaccctgggaatgggggaatgattacaggctgtgacctcactggcgcagcacctctcagcggcagtggaaaccacagcctagtcctctcaccactgcagaccagaatcctgccctgggccttgcctggtctgcctcactctgccatgggctgcaggctcctctgctgtgtggtcttctgcctcctccaagcaggtgagtcccgggcccaggtgacatgatcctattggagtccctaagccttttcaccatgacaacaacagcaggccgtctcctaggatttgcctgaattctgcttctttcctttgcaggtcccttggacacagctgtttcccagactccaaaatacctggtcacacagatgggaaacgacaagtccattaaatgtgaacaaaatctgggccatgatactatgtattggtataaacaggactctaagaaatttctgaagataatgtttagctacaataataaggagctcattataaatgaaacagttccaaatcgcttctcacctaaatctccagacaaagctcacttaaatcttcacatcaattccctggagcttggtgactctgctgtgtatttctgtgccagcagccaagacacagccctgcaaagtcactgcatccctgtgcacaaacctcccggctcagccaggaagctgcagggcagcgtgtgcacctgcacccagggctccagtctccattccctgatggcctctgatggagtttcagtctgtagtacagccagctagtgcacccagtggagaagtcctccatcttatgcacacaaaagtctcacagaattgtttatcagctagagcagggcttcacaacaaagccactaaagtattagggctccacaaacaaaaaagagcctgtcctatgcactgatgatcttaactgatgggggaagctctttcttttctttctgtgtggcacatattggtacgtattttatataacattatgaaaaaaacacgattgctgaaaatggttgatgagcacaagcataaaggagggggaaggaaatatttccaagatcaagagacaattctgatgatcagtgagtactttattcaacagaaaaatatttggagaggcatgaaattccatggcaataggtaaactggaaagtgttgaggagatgccggtggaggtagccttgtgcgttgtgggctccttctcttcaagaagggtgaccagcaagtgtctctcccaattctgatgaatatcatcttgaactgtcctcaacagcaggcaatagccagatgactggggatattgggagacctgaaaggactttggacacaaatctctaggcagtggtgagccattggtcctactccaagtgaaacaacatgatgaaactgatattttggtagaggaacactggtagtagtatggatcagaaaggagatagatttttgggtggcatgaatgattaggagacttctaaatatcctacatgaaagattagaaagggttgatgtgaagcattgtggacaatataggcttgaggctctgcattatgttatttcttggaaatgtattgggttttattctgggagggttgaatgtaggacttgctagggtctatttcagccttgccctccctcttagggagccccagcatgtggtcatcattgctagtgcatggcctttccagggtcttagtgggaatcacagtcacccaccacgactctccactctcactgggtctgaatgccattgccttcctgccctgggtatcctctgaaatccctgcccgtgtctacagccttccagagtttgttctctgctgggccttcgggagtgccaccctctgcatacacaacttaggacctggcccagaaagaaaaataaaaaatgaaaaaagattttcttacacaggttctcagggctccttggtagtactctgtgtcctaaatcccagctgtcttggagtcagttatgtcctcttatcttcaatcacatatactacttctattttatataaatatgtttacttggcttttcttcatatttaccattccactcttcactcttcttgcaattcacatggtcctgagatcattttccttcttagatccatccctaattcagaccacttgaactcgctggtcaccaccccttgttgtgggaaatgcttatgttagctgttgtcctcaggacaattaaacctttcgctttcaccattattcaagttttcagtttaaattctattgctttttttaaattgtctttgcaatttggtttacttattgagagccaaacaatgcaataaaattttattcgttcaaatttgttctactttgtagaagggccaaagtgttttcttgctgaagtagataccaatggaaacaattttaatggtaataatactagtgtttaaaataaggctaattttaggtttttatctagtgaatagaatatctccaactgtagcaggatagagatcgatcctatatgtaacctgttgagggggagaatactcaaccccattaaattctaatctacatgctttacattttttgtttgtttgttttatgggccacattgaaaatctgatgaaatttttgcattagaagaatgctacaattttcctcctgactgagaacatccccaggttaaaacaaatctaaattataaatccttgacttaaatcatggataagtatcttccctcagccccatgtagatttacatataacatagatttacgaccctaatctcatgcctacaattataattatcatcatgaaaaggtaacactgatgtaatacaacaataaatagatggtaaaaatcactttgaaagtatgaatcatctcatttttgtgtttatttgtgttcatttgtatctccaaatgctctagaatgaaaagccaatattggcataaaagtaccttttaagaaaattgatgatattccaattcttaactggtcacaaagcataaatagcttatgcagtgaagtacagaagacccataggaagtcatccagctggttcctagttggaaagttctccacagaactgatgaactaatgtggtttctaacatcttagaaatggcagggctttagagatcatctcatttcagttctcctgatttaatatatgaggaaatatggcatcacatatatgaagtgattgaacaatgacatactgattacatttctcaaactttatgtaagatatatttttattctctagttgttttctgaatatgttgaattgccttacacaaatagaattctgggggtgaaaatgttggtgattttctgcttgctcctagctgttgctcaaggagtatttgttgaacaagtcagactggcccaagaactcaagagggctgggatactgtctgttctgcacattactagagatccaggcatagacaattttctgttcttttttcttttctttatttcatttcatttcatttcttttccttttttttttttcttttgaggtgtgtggtgggagcagggtcttgctctgtctggagtgcattgacacaatcatggctcactacagccttgacttccatggctcaagcaatcctcccacttcagcctcttgaatagctgggactacacacaggcaccactacattccgctaatttttgtagagataaggtgttgccatggtgcccagacacagacatagacaatttctgttgagtaaaaatttagaatgtcttatgtgtgtggatacctggcgttctggctgctgactctctgtgttgttgccaacacctccttcgtcttcattctcccctggcctttcaaacccttctctgctgctcagggttgtgagatgtggaacccatctggatgctgacactgggtcggtgagtggccaaatactgttttggccacaggcaggagctgtgctctggtgaaacctctaaggcagggacctggggaagggatagagaataagaggagagatgggccaggagggatcttgcccatggggagccaaccgtgcctcaactgagagcatggctgtactcagcccaagcacactaacatcagcttcaagctgatttccctttcctttgctccacacaccttgtgttgttctttttcagcatcctgtgtatgttagctctaagcccagccaagccccatgccctccacttcagggacagagggtggctcatcccttttgtgctccctcagctccctccccagtgcctggtggctggttggcaacacagtcatgcccttgaatgatgggagctggtgcacactgcatccgtgttcatgcagtcaccctccctccacagagccgggcagaaagggctccaccacacttagacattgagggaagggacgttttgaatggcactgttttatgtgatcccgcaggacagaaggagatttcttgaatgggagtggtctgttgttgagagggatcctgaaagacagggagacaaagatagagggaggatccacataattaggaagcagctgagagcaaaggagcccctgccagaggaatatccttggggggtaaaaagccagctctgccctttctccccagccgattcatcctagcccagcaaattcaaatctaccttctatcagaacttagaaaggatgtaaagcagtcaggaagaaacatcccctgggtctggggaaactatcaggagcagtgacatcacaagaaaaaccaccaaccagggccaaggagaccagagcccagcacctcgcccaaaggaccccagtcagaggccccatctcagacccgaggctagcatgggctgcaggctgctctgctgtgcggttctctgtctcctgggagcaggtgagttaggttgaaattgtctgtccttggactccaacccttttccttgtggctgcaggaacaaccctcttcctgggctctgcctgaattttgtccctttcctcctacagttcccatagacactgaagttacccagacaccaaaacacctggtcatgggaatgacaaataagaagtctttgaaatgtgaacaacatatggggcacagggctatgtattggtacaagcagaaagctaagaagccaccggagctcatgtttgtctacagctatgagaaactctctataaatgaaagtgtgccaagtcgcttctcacctgaatgccccaacagctctctcttaaaccttcacctacacgccctgcagccagaagactcagccctgtatctctgcgccagcagccaagacacagccttgcagagtcaccgctttcctgtgcagaaaccttcggggcctgccaggaagccgtgggggccacggagggctcgggtgaacatttcctccaagagccccgaagaagcttcagaacatcatagcacctgctaattcatccatgtggcaactttacatcctatgacatatttagagtgtgggtttccttttgcctgagtgtgactctgccccgtcaactgatttgaaaaaagagaaacatattcagatctagtttaaaaaaaaaaaattttttaatcatgaaataggccgggcatggcggctcatgcttgtaatcccagcactttgggaggccaagacgagcggatcatgaggtcaggagtttgagaccagcctggccaacatggtgaaaccccgtctctactaaaaatacaaaaatcagctgggtgtggtggcatatgcctgtaatcccagctactcaggaggcaggagaatcacttgaactcgggaggtggaggttgcggtgagccgagaccgtgacattgcactccagcctgggcgacagagtgagattctgtctcaaaaaaaaaaaaaattcctgaaataaagcaagcatgctgtaaggattgtgtagcttaaaattttataagaaccctctaaacaatcacctgtgtcaccacagaggcacaccctgcactgggtcagacactgtcctgtgaggagctgtgttctcctgacacttcatgtccagtggtttccatgactcttctttggggccaagggttccctttcatcataggttgttgtcatgcagagtcaagcaacactgagcactgggaaatcagagaaggaacttccaggcaagggtcccagtgcagaagccagctagagaggacagtagtagactcaccctttgggaaatatgtttgagaaatatgtatctattttcaccagttctattactctatattacagcttgtctattctctaatttctcatttgtacactgaaagctagactgtgaattctagccctgatcaaagctccacatatacacagacaccttctctgaaccctgcaggcagcaaacttgcctctgtctgctccccttgctgcagagtccatggatcatggtctagaagtttcctgactcatccactctccttctcttggctggaagcctccttgttggtttcagatctcagcgcctccctggattgcctctccagactgacacttgaaggattatttttccccctttggtctctttattcccaatgtgttcaatcatcaggctcagagcctgatgcctccagagcgcagctctacattagcttttagagaggagagtgggtcctggctgttctgtttatctgttttcattcactaattcattcattcatttattatagagacaaaagattccctatcccaagatatatggtcatctgtgctgtatcaaaagagaagatattcttctcacagttttatgaaatgaggtagcttcgcaacttgcggggagcagcctcttaagttagttgtcaaaattaggcttttgcctaagtaaagttaggatcctaaattaggctcctactctcccacaaaaactgggagacagggcctctatcttccttgacgattgtatctcaaaaagatggttcctagagtcttgggaaagacattcctgggtcataaagctggctagaggtttacagagattttaataggattgtcaaaaagccttttctgtgtttattgagatgatcatctgggtttgtttttagttctgtctatgtggtgaatcacatttgttgatttgtgtatgttgaaccaaccttgcatcccaggaatgaagcctacttgattgcagtagataaactttctgatgtgctgctggatacagcttgccagtattttgttaaaaatttttgcatcgaattaaataatttttaaataaggtgacttacattaattgctttttaaatataaaaccaattatgcattcctggggcaaatctcatctactgattagatattaacctttttatacattgtgagttaaatttactttatttttgttaaggatttttgcttctatgttaatattagtactatttattcttcacaatttgtaaattgataaacttgctcaatttcatcaataaagtaagctgggcctggagttttctttctggaaatgcttttaattattatgagttcaatttttaaaaccacttctacatgtattttttaatatccctatggacattcaagttatccactttttgagtgggtaattgtgttttttggggaatttgtttattttgtctgcttttgaatttattggcataatattaatctttcattggagttctaatttgcatttctctaaggattaatgatgttgaggacattttaatgtttttattaccatttgcagatatgtctttttcatatacctattaatgcttttgcccagttttaaaggttaaattatatatcttttatattgatttataggaatcctttataaaatataaaggatttttatattatatagaatcctttatataatctggatacaatattctagtctgatatatgtattgtgaaactttttcctcagtctgaaaattttcctttccactttcttggtagtacctgggcacaacccctatgaaatgagagtacccttctgtctcctttaattttgtctctctaccttcacccttatcagtatttggcaggcaattaattcagtcagattgagagagtgcaaaggcttctagctagccctcacaacactggcttgggtacacctctaatctccaatcacacgaaacaatttgccagcccagaagctacccctgctatgtattctaccatgagtagaccttaaatgtgcacctcccactctctccatagtacatatggtagaatggtgatggatccttcttttggcagactttccacaatgcatggagctatgcctatccaagcacatctctgcatggacaaaggaaggggtggataattgagtcagtgtttctgcttcttgcttgtgagttttccccagtaaatcttgttttatgtgtatattgcacagggctagtgctgtctacatgtcccttcatatgatggtgctctcacagaattctgaggctggaaggaacaaacaaaagttctcataaagagaaatttaatcacctctagaaagaagtccgtgcttaatggctttggagtttctgtgaagaaagggtttcctcctgccttagaaggtgggcaaagtgagcaacatcttcaccaagtcaggaacacttgatttcagccagaggcagaagtggggttctatgataatgcccgattgtggttacagagggactacatgagcaaggccatggaggtgaaaatggattcatttgggctgaaatcctgtaaatgaagtaagcgggaaaacccagcgcacattccaatggaagatgcagcttcctaatattgtgctttcaacttagattctgtcatctgtaattactccacacactttctcaaatcattagcacaactgtgggccaggtaatcatttagcccctttgcttggtacaaggtagccatgctctctacttagctccctatttttctctgggaagcttttgctgagacctgcagtgaccatgcttctcagacttctctctttcttattgtcatttccatttatattttaactttaattgtagtttatttgattaacatctgacatgtttatgtttctcttttgcttatttgacctcacttaatgataacccaggtaactggtcagctgctgctaatcaagttatattttctggggttacattggttattttttcctctaaagtttctatctgtgtaagaattgaggtagcagaaccttctctctcttttttttttttgagacagagtcttgctctgttgcccaggctggagtgcagtggtgcgatctcgactcactgcaagcttcgcctcccgggttcacaccattctcctgcctcagcctcctgagtagctgggaaccttctcttttttggaaacagggtctcactctgtcacccaagctggagtacagtgatgcaatcatggctcactgcagcctcaacctctgagattcaagcaatcctcccacctcagcctcccaagtagctgtgactacaggcacacaccaccaccactggctaacttttttgtttacatttttggtagagatgaggtcttgctatgttgccaggtttctctcaaactcttgagctctggtgatcctcccgcctttacctcccaaagttctgagaatacaggtatgagccaccgcgcttagctcctcctattgatttctgaaatttaaatggagatcagactgtctccacgcaaggaggaagtcagacagggcagagcttaaccaatgtccacggtttgttttctcactgcagtcttggacttaccactcatctcttcattctctggctcaaaatagcttcagtcttcccagaagattctcatgattttcagtttgtttctggtttcttagttatttcttgtctcatcaggctcccctgaggaaggagccaggagatgctacaagtctgcaattttagggggagtcagatggagtgcactggtcttttgcacttctttataatattatctaagcctcctcttctttgaaatataatggctattcatcatgggatatgaggcatctcagaagcaatctaaatatctgtttgtttctttttctagtaaagaattgaccagtattctagcaattttattttaggtattcctttaaaagtaaaaaatacatagtttttcttaacgtgacttctattgatagtttatatttttatgattttgtgtagtagctttaccttccctaggatcagaaaccacatcagataatcagcttctattatgaaagaagctgattcttctatttggagagtgaggtatgcagaaaatccataaaaggtattaagttatagaacaccaccatctgatccaccatctgatcttgagagaattttaactggtttatatccatgaatactccctcagtagggtatttttgttctctggatggcatcttggaagaggtactggtcattgatcatatctcactggcacattggctagtgaccgctaatgtcacatgcagctggattggaatctcttctcattgctttctcatggggtcatttgcctttggacttaaaaatcaagaaatttcataatgacaatatctagatttactgtatatatgtaactattcttaaaatttgataacagatatgtcaaatgtagatatttaaagaaatttggattggaaatacactaaatcagaagtagcaagtgaaggatagcggttctgtaatggaatctttctcagattctgttttccctagtctcatgtttcttttttaaacccagtctggcctctccttcttagcttactaagtatagaaccacaaatagaaacttagaaatttaatcattttctgcacatatctttactcatatatgggaaaatgggcaagaggatattgtcagtgaactcaggcaaaaagaggatttctaaaagagagagtatagatgggaaagaaacaaattccccagcagcatgggaacagtgggtactgttttgtttatttttggataagctgattagttggcatgtagcacagagtggtctgaaaggtcttcttggagcaagctggctggagtcatcacagaaaaaagaactttaataataaatcatccacaaatccctgagagtctgcctgccgcaagggagacgggatgacttgatgtgattctggcacagttcttcctgcagcacacctacctgagctaggccaggtttgcatcatctccttcatcagcattttctcaaaggcaacatttcttttctatcacttttttcccttttacagtgcaaaaagtgatcttgaagaacataaattttaaaatgtgggggtttcttttagttcccctagagaaacagtataatagtcaagatggtgaaattgttcctaatttaaatatgtcccatgtctcttgcaccatgttagaaaggctgtatccatcagctcagacagccacagcaaatagcacagactgcatgggttaaatacaaatctttttttttcacaactccagagcatgaaatggggatgccagcatgtggggctctggtgagggccctcctcttggcttgcagagcaccctcttccagttgaatcctcacatggtggagagagaacaagctagccatcaagtgtctcatctcagagggcattaatcatactggatcagggctccacttttataaactcatgtaaacataattttctctataaagaccctattgtcaaatattgtctccctgggggttgtattttggagggacatcaatattcagtccactaacaatggcaaaatcttggttactgcacagtgggccacatgggggtgctgtggaaccactgagctccaaatgtctctggggcatgcacagagccaggagcctgggacagggagggttaaggagcagccttgcttgatgtttgtgctcactaaaaaatgtgatgacggatacataaaactgcaggtgtgcctctcatcagggagccatgcacttcagctatgcctgggttaggaagcctctgtgagccgaagagggagaatgaagatgggatgtcccatgctgggatgggacaacctgcatgtccagggcagggacagatagaggaacaactgcctggaaggaaaagcaaaggaactgtgggggggacatgcagcctaacctcagtccagccccacatggtatgtgagagtattaacagcacaaagcagaggtcctggatcgggtaagccaggggcctaacaaggaaggcaggatgcatgggaacccgcagagatgacatcagagtagtgatatcacagcctaacatccgatcagagatgcaatgcccaaaaccccagctctcagaggaccagtatccctcacagggtgacacctgaccagctctgtcccacctggccatgggctccaggtacctctgatgggaagacctttgtctcttgggaacaagtgaatccttggcacaggtgggatgtctctgaagcacgcctcatccaaggcaccctcaggctccctcctgtgttcttgccctagcctctgtctccctccctcacaggcccagtggattctgctgtgcagaacagagagcagtggacctcaggaggcctgcaaggggaggacataggacagtgacatcacagtatgcccctcccaccaggaaaagcaaggctgagaatttagctctttcccaggaggaccaagccctgagcacagacacagtgctgcctgcccctttgtgccatgggctccaggctgctctgttgggtgctgctttgtctcctgggagcaggtgagtccctgcagacaggatagcgccccattctgagcctgtcctcacccctgtgtcttccactttaccatggggaggcaccaccaggctgtctccggtgctcattctccatctgcttttcccacaggcccagtaaaggctggagtcactcaaactccaagatatctgatcaaaacgagaggacagcaagtgacactgagctgctcccctatctctgggcataggagtgtatcctggtaccaacagaccccaggacagggccttcagttcctctttgaatacttcagtgagacacagagaaacaaaggaaacttccctggtcgattctcagggcgccagttctctaactctcgctctgagatgaatgtgagcaccttggagctgggggactcggccctttatctttgcgccagcagcttggcacagccctacaaagccaaccacattctgtgcacaaacctccctggcccaatgtggagcaacctcagccctgacatatctgtgagaacctggggactgcagggagaaagaaaggcaatttagaatgctaggatccacagcctggggctttctgcaactcagggctggggaaaacaaggccaagagagcctgctcagaggatggtgctgcttccgtaggttgactgcagcattaccttctttgccgacactgtgaactacaggagtagaggaaatgtgtgtaatttaacagctggcgcactctttctcaggacaagagatttaattttgtggtcaagattgttgataacagtgtagtgtagaagggagaatcacagggtttgctttatacaacttggggagaagaaattgaggttttgggaaagtcaaggagagagaaaacgaaagatgattgaaaacagagatagagcagaaggtgatgaaaagtggtgttctgtgcaccatgaactctctttcccccacccgaaagttttcaacacctagaaaaaaataaggaaaggtcttatagccaccggaatcacctggtagccggtcccagtcggaggcatcaccaaattgccgcttggccattgtgagagccctggagttgcttctgctgtcttccttcttccagccctgatcttgactcctcaggccacagtcaggtacttcccaaaacacagaggaaggtaaagtcacccttcttcctaaaggggcaaatactttccagtttccccccaaataaattctgcaaccctgggattcctttctgacactcacctcccaaatccaattaccttctatgaccaaatgctctttgaacattttctaaaactcagcagtctctacatcctctgcgtttgtccttacagtttccatggcctgggaggacctttgttctcctaagacggggccacatactgatcatctgtcaaggacaggctcacacctgccttcctcttcacttcttactgtgacattccctgggactgtactgtatcactctctttcctttattttaaagccaagcatacaattgatactctttgatgtttgcaaaactaataagttattgccctctcatacagaatcctggagtgtgattaattactgtcttctctttacaagggactctacatgaaatatcatggagaatgattatgaatagtcttagtatttcatgtaacttctgtaatattcctagcaattgtgtcttcacagtcaggattgatgaccagtgctgtcaagttcccaaagggtatctaatgctggaatttgcaaatgttcttttggagtgaagaaaattatgttatttaggctgactgaagaatcactaaagaaagaaaattatggtacagtaatatttataaagactcataatcctgtaaaaaacttcctcaccataaccacactttccacagccacatttttagagatttggtgagggtggaatatagtcaaaggtgcttcttaatcatccttgatgaaatcaaccaaaatcaacctacaacattgaaaaaaaaaactagctttgctcagtaatggaatcttatcatccttgacaatgaaaagatattatgtgtttgtgagtgtgaatgtgtgtgtgtgttttcttgtggatactcactcacatagaagtttctcccctggtggcattttatgaggtgctggatcactggcagagctcctaggcacttctaggtaaggatagaaaatagcagacctaacggaatctgcctaagttatagctgataagatagtttatttcaagattttatacattcagaaataaatttgtaaaatcaaaaaatcctttttataaaatgtgcttgctaaaatttgtgaataattaaactaaatgcaatgtgtgaaaagatatgagtctgactaatcaaagggagctctgcaatgtagtattttcagcccagattggcttgatattgtcacactttcatcctgtggcctgtataattctggctcctttcttccatcttatgatgctcattgcaataatgtaacagcaatttcttgtgcaatcaagatgtgtccttttgtctccactggtcaagggtgagtttgaagttccaccctaaatcaacccttccgggaaagcaatagacagggtgtgtgaaagaatgggggctgcaggggttggagtgggggcaaccgtgttcctgacttggactatcctgagctcatcaggtcagaaggtgtgaatccatgggactgtggaatgttggccacttgggggcgctgtggccccactatgctgcagggaaccctggggaggggtgggagggtggccaggaagggagggcggaagggaatgcctggctgcctgctgacatcaggagattaggtggaaattagagtaggtcctggcctgggactgcccagggaaaggtagggccagggttggcaccaagcagggagtgtttctgcctctgcatgggcagaggagggtgtaggggctggggtggcaagggctgggaatcagtgtcaggacagggatagggtgggcagaggaaagtgaggtgtgatgtgggcatgcggggactgtgaccagccacctcccctttagttgaggggctgtgcgggacaggaaggctgcatggagctgctgagcctgagtctttcaatgggtgaacaaggcaggagtggcctgcagaaagagtacctggaaaaggactgtacccgaagaattgggtgacactttcttagctccactcagggagtgaccctgaggagggtgctgccagccagaggggctcaggtcctggtgagctgacaggcttttcctccagacacttcctgttgtttctgtatgtgatctggttttatgctcactgaaatcatgtaaggtaggtatgatttcacctgtttatacatctgaaggaaagcagctgttccgggtctcatattaagtaattggctgaggtgttttcctccaacatctctgcaccagccccgtcccccgactctatatctgtcccttcatctggcttcccctttccaggtccaattagcaggagcacaaggtcatgcctcatatgtgaccattgtaacctcttccctgacaagtccaaggaacacgtgacttccaggccaagcatatccattcacctttcactgaagcaaaacagaaggatgaaattatctgcactgtacacttcctgtaactgatataatctaccttgaggaaaagtaacaagaaaaattgttattcattagttattattttatttaatatatgtttggagatcctttctttgtatagatattttatgacataaaaagcaaaataaaaaagaacaaatgaaaataaaaaagaaaagcttgaaagaataataagtgtttcttactttttagagtattaaggtttgcattaatttttttaacttattcaaagacgtttgctcagtttctgaattatacagatttcctttttttcttctctttttctctttagccacctacagctttttctgccagcttttttagtttaataacctaaggctatcttttaaacagatttttaaatgtacaatatagtatcgtaatctacagacacaaggttggacagcagatctctaaagcttcctgattcttctttactgaaattttgtagccactggcggcagctgcccatttccccctcttcctagcccttggaaatcaccattttcatcttcacttacatcagtttgacttttaggttgcctcatataagcacaatcatgtagtatttgtctttctgtgcctgactttttcaactcagcataatgtcctccaggtttagccacattgtcatgtatggccagaatttcttctttttaatacttaatgatattccattgtatgcatacaccacatttaaggtctgaatattaaatgtatagtatcttattgtttctgcgaaaccatctgtcacaggagtggcagggtcatttgcagaacagtaagcactgagtatatgaatgcacattcattcgaagttcaattctgcttcatagagaagacttcaaaaaaataataatttcactatttattgttattttactatacacaaatagaatttcttttttcttttttttttttttttgatacagagtctcgctttgtcgcctgggctggaatgcagtggtgtgatcttggcccactgcaacctctgcctcccgggttcaagtgattctcctgcctcagcctcccgagtagctgggattacaggtgtgcaccaccatgcctggctgattttttgtatttttagtagagatgagatttcacagtgttagcctggattgtcttgatctcctgacctcgtgatctgcccacctcggcctcccaaagtgctggtattacaggtgtgagccaccgcacccagccaataccccaataccataaaatatttagcatatagtagaaatctagctatttttatttcctttgctagtctcgggcagcctcttccactgcgccaatgcccaaaggcagttaaagacacattttgcctggaaatcttagggtgaggactcaggaagccacagaaatggaaatacatatgcgtgatgattactttgaaagtatgaactagagaatgtagcatatatccctcctcaggcatttaaaactcagtattattgatatataagttatataagcattacacattttaaataaacagatcggttatacgtaaccaaataattaacagaatgaggagctcctgaaaagttttatggttttaaaaggggttgaagccaggtgagctaccagatccacattagggacaattctatctggagatggatattgtgatgaaacaacctcagaaggtcttctaacctggtacagactgattttacgaagtttatttattcattttctttcatttcttttcttatctgctcattcactccaattattttgtaatgatattttggcgaaaattaatcatctttaagggaaatattttgagtttcatcagacacacatgcagctgagctttgtgttcacacactgagtgccctggggccaaacaaaatacggtaatagtgaccttgttgagagatgacgtcacattgggagaaaggttctctttgtgttgacactaagtgtccaattcataaaacctaagccttgagctaggaaatgcccttttctgccctgggaagcaggctcctacattgtgtgtttttctgtctcctggtctagcctggacacagacagtgtacccactcacgaacttgttatatcctggctgtgaatttcagcaccaggtggccctttgctctgacttcaatttctgtgtccttctctcctaaacaccatggatgctgagtgactcagactccagtcatgtgcttttgccaaaaggaaactagcacaagaggaggtgagcagaatatgaaacaaaaccatgtactcaggaccggcaatgtgacttactggcagctctttgctcaaatattgtaaggaagttgaagatcatgacaatgttacagtaacagggatctctttaagtgtggggctctgtgcactaaaatacgggtttttttttttcttttctttttttttttttttttttttgagacggagtcttgctctgttgcccaggctggagtgcagtggtgcaatcttggctcactgcaaccttgcctcctgggttcacgtgattctcctgcctcagcctcctgaagtagctgggattacaggtgcgcaccaccatgaccagctattttttttttttttttttttatttttagtagagacggggtttcaccatgtttgtcagactggtcttgaactcctgacctcatgatccgcccacctcagccttccaatgtgttgggattacaggcgtgatccactgcgcctggcctttttttttttttttttaattgttactgaattagtggtgagaatcctgaccaagggaatattccctatgaaatatgacacttcaaataaaatgagagcgctttttcttatcctggagcctgcctcttctctcctctccccacatccctcacatgtcaagacacctttgtgcccacagatcatgggcagcgttgggctgccactatcatccacacagagagggcagtcagcagcgtgaggtggttctgcctgctgcggtctcaccccaggcacagaaagcaagagccctgggtggagctgaaggtgctcagctgggcttgtcaggagtcccatctgtcggtgaattgaaaagaaacagagcaaaatgactcctccaatggtgatgagcctgcccctgggatttggaaacttggtaacagagaaaaccaatatagacaaaggattttaaacaggattatggtcaattaagcaaattagaaaaggatacttgaagggggatttgggacacaggagtcaaaaacaccgggaagacatgagaagtttccctaagagtctaaattagagaaatatttagataactgacaccagtgtatgaatgaggaattatatcatcacagggataagagttccattgagttacaaactgcttccaaaaaggttaagaaaaactcgtaaggctgtgtcaattcagacaaaggcattcttcccattcaaacggttcaccggtgcatgaatcttgaatttgaccatctggggaaggggcgtggcctctcctgacaggaaggctctggggcccaggcagggagaatgaagtctcagaatgacccccttgagagtcctgttcccctatcaccgatgcacagacccagaagacccctccatcctgtagcacctgccatgagcatcgggctcctgtgctgtgtggccttttctctcctgtgggcaagtaagtcctgggcagggccccatgtgtggatttcaaggcccagcctgtttccattgtggctgcagcatcagctttgttcttctctgcaggtccagtgaatgctggtgtcactcagaccccaaaattccaggtcctgaagacaggacagagcatgacactgcagtgtgcccaggatatgaaccataactccatgtactggtatcgacaagacccaggcatgggactgaggctgatttattactcagcttctgagggtaccactgacaaaggagaagtccccaatggctacaatgtctccagattaaacaaacgggagttctcgctcaggctggagtcggctgctccctcccagacatctgtgtacttctgtgccagcagtgaagccacagcgctgcatggccgtctcctctctgcacataaaggcagggaggctctgcctcctccctcaccccagactcagtgatgccctgggcagagttctctgcaccaggaaacttgaaaccccatcatcatgggtctgaggcccccaggatgaaacaggatttgtatttcagatccatctagactctcgtctctccctggggaccatgttgcttcttctctctagggttccccccagcccccaccctcatgttgtctctccctggggaccatgttgcttcttctctctagggtttcccccagcccccaccctcatgttgtctctcctgtggcccacctttcccatctgggcagtcaccctccaaggccttgctgggtctctcctcccctcacttccccacacctctccacagcagccatgaggggagcccctcttctgtgcctccttccttcccatcacagagacttcaaagtccattttctctgccctgggctggaggcttcctttctgcagtggccaactcctacctgtgcttcacatctcagcatgatcagccctcctgtgggaagcatgcccttgcctcccagctgagatcaatttttctgttataagcactgatggtaaaatgtgcttgttagtcaacagagttgagcacagttggagttttccagttacttgtctggatatttttctgctcatgtcgattttaaactccataaaggggaaggctgtgcttgttacatttaccaacagctgttcctggaatgaagggagacctgtttcacagataatggatgagttaatgaatgacaggctgattgagtgatgagcgggtggatgaaccaataacaggaacactccaggtccgctgtaccctggcagaaatctagagttaactgtgcctgagatgctctgctatgagctcttcaaagggcactcgcttgttgaacaagcgttggaccattcattgtgcaagccagtttgtcagttcatctaggagtttccaattttaaatatcatatgttcttcaaactcaatgagggtaaagtctacattatacaattctaagttattttttaaagttttgggttaggaaccaaaaaggaaagaagagggaatatctttagactttggagtttttttattgaaaatgtatttatataaatttttcttggaagaacaggtagggaaagtcatgactacacagccttataggtgctaatttctggagaaggtgtcatgaaaaataacaaaaatgagaactgtgttctggagggaacattgtgactgtcctgagagcgtgttctgatcccaggaaccaaacccaggagtgtgtttggcaactcagagtgcagcagacaattctttgccccgtgcatttgggataagactggagacagctggaaaagctatggactggacgttctgcactctcaatgcaggactctctgaaatcccacagattaatgtcaggtaaatatattcccactattaagacaactaaagcaagaaccaatgaagaaaagtgagtagaaacagtaagcaattgaaatgtatgaagacaaggaattttgccataaaaagatataaaagttaaagagctatatttaaaggaatacaaaagcgaattgatatgtgaacatgaaaaagaagactgtcagaaataatcaaggaaacattaaaaaataatcaaagagaatacactaacgattaagattatcattgaaaacaaaatggaaatgaagaaaagatgacatgcttcaaaagagattgttacaggaggtcaaagacagatctgaagaagttacctagaatgcagcacagaaaattaaacaggaaacaagaaaaggtaagggataaggaataaaacacttgtgggttctagtgtattagtgtatatataatattttgttggaacttcccatttttcttacacatgattgaagtgtcacaaagagaaagtagagagaatgataggtgataattatgagacattagctgagaattttcaagacgtgtttcaggacctaaatcctctgtttcaacaagttaaatgaatatgaagtagatgaatacatatgttatggtgaaattgcggaacacaaatgacaaagagaagattttaaaagtagcccaaaagataactatctcccagcagaatagactgaaaggaacagtgaaagtcaagaaaggagattaaaaataagcatcaagtcagaattataattctcattcattaaatattgagattgaggtaaatatatttatagatagagaaagaaaaaacacggtgagtttgtcaccaaggtatcctttctgaattatagttaacaaagatgggaagtggtcccagaagaggggcatgaggtgccgctcgtgagggaacccatgtgatgggacagccccattgggcacgtgtgactggggggatggaggaggctggggcatcaatggggatggcacaggggactctgacttgcaggaaagacaatgagctcaccttttggtgctttgtgttggcggagctgttgacacatcctagagaacatgcccagcagacagaggagcggctgtgggatgaggagataaactcagagatgcagcgtgaggcctccgggtccagacagcatgagagcccaaagcgatgatacatgcattgatgttgttaaaaaggattttttttttttttttgagacagattctcgctctgtcgcccaggctggagtacagtggcgcaatctcggctcactgcaagctccgcctcccgggttcaagccattctcctgcctcagcctcccaagtagcttggactagaggcgcccgccacaacgcctggctcattttttgtatttttagaagagacagagtttcaccatattagccaggatggtctcgatctcctgacctcatgatccacctgcctccgcctcccaaagtgctgggctcacgcctgtaatcccagcactttgggagaccaaggtgggcggatcacttgaggtcaggagtttgagaccagccggggcaatgtggtgaaaccccgtctctactaaaaatacaaaaattagcctggtatggtggtgtgagtctgtaatcccagctactcaggaggctgaggcaggagaatcacttgaacttgggaggcagagtttgcagtgagccgagatcacactgctgcactccattctgggcaatggagcaaggctctgtctcaaagaacaaacaagcaaaaagcaaggaactcataaatatttaaaggagtcatttaagtaggtcctaaaataaatcctttgttcctgtcattgcgtggattgagagaggatgtgatgtcactatgggaccttctgtgtgggaacaaggacatccctcctcctctgctcctactcacagtgactctgatctggtaaagctcccatcctgccctgaccctgccatgggcacaaggctcctctgctgggcagccatatgtctcctgggggcaggtgattcctcagatgccaagcagtctcctgtgtgtgtgtgtgtgtgtgtgtgtatgtgtgtgagatgtgtgtgtgagagagagagagagagagctgactatagttgtttttctcattcagttcccaatttctgtctccacagatcacacaggtgctggagtctcccagtccctgagacacaaggtagcaaagaagggaaaggatgtagctctcagatatgatccaatttcaggtcataatgccctttattggtaccgacagagcctggggcagggcctggagtttccaatttacttccaaggcaaggatgcagcagacaaatcggggcttccccgtgatcggttctctgcacagaggtctgagggatccatctccactctgaagttccagcgcacacagcagggggacttggctgtgtatctctgtgccagcagctcagccacagcactactgctccagtgtcagcttggttccctaggaaatggggtttctagaacctgaatgctgacaaataagagttgtatatgtgtataccatgcaacctgcgtttaaaaatgtatgtacatagtgcaatgactaaatctagctagttaacatatgcagtacctcaatccttatcctttccagtggtgagaatacttaaaatgtactctgttagcattttcccagaatacaaaccactgttgctaactctagtcatttgttgtataatagatctttgtaacatcttcgtcttatctgagtgagattttgtatctgttgaccaacatcttcccaacagtccatctctactccagcctttgctaattactgctctagtctttgaatttgaagtaatttccctgaggtctttagctcaacaagatgggggaattttctctataatgatgcttacgttatttttgctttgtttttgtttcgttattttatgtcttgcaatatagtgtttattgtaaatataaataagtatattgtaataaaaatccttcacctctctttgggtaaagctacagttcacatattctaaatttcatgctgtgaccaacgctgacataattatggatcatgggtttctgggagtcctcagagacagccccatacaccaagtttaagatagaatattccagacccagccaggacagaagtgcatggtcctgcatagctccttggaaaattatagttccccaaattcagttattggatattgtggtgccgcagacaccaaacgtctttctctagcaaatgatggtccttggcagggattgttctgaacccattacaattttgccatcatcaaatcactccttgctgttaccttgtgtctcctgggagtgaggacgccccgggcacagatggaaattccctgaccttcggatgctatttcaaggacttcctaagaccttgtgtccatctttttccacctttatccacatgactcctgagacccacgctcacaatagtggaccagctctgattcttaggcttgaacagaattcagaccacagctgtaaacactgttgctgaaaaaagatgtaaaaaaggtgggcagggcttcctacctacactgagggtgaacatacaagggcataaagggaatattttattaatagctaaaaaaagaagaaatacaagccctgctctaatgaaatgagaactgtagcttcacccacagagaggtggaagattttattacaatatacttatttatattcataacaaataatatatttgaaaaaataaagaaaacaaaaagtaatataagcattattataaagaaaatacccctgtcttcttgagttaaagacctcagggaaattaagacacatcaaaagactagagcagtaattaccagaggctggggtggagatggggtgctggggagatgctggtcaaaggatacaaaatttcactcagataggaggaagaagtttaaaaaatcttttatacaacaaagtgactagagttaataacactggactacattctgggaacatgctaacagagttgaattttttagttgaaccaaagcagaatgtccataaaattattttgaatcaaagtctagaagctttcaaaccagttggcatagccttgtgttctgtgatctcagcagcttcagaggacttggcaatcctttctctgcacaaacacccctttgtccactctaagaactagggacacacactcttatcctatcacgaaaacaacaggctgtgctacagttgctggtaactcgttttaagggtgttgagtatggaggattgaacaagattgaaagctatgctcctgagtctgggaatgtgctggaaccagcttgcatgattcagaagagccaaataggcaaacccttcccaaatcctcattgaatgaagccatgatgacagcttgaaatctgccatagtggctatgctgataccataggaactgacaaatgctactaggcatggccccaccctcacagatatccagtttacaaggacatcactggaatgttttctgatacaatgatgatcctattagggcatgtcttatggggccaaaaaggctcagaatccactgtccatctgtttctgctcctagaagccatagtctaagggaatctcaagtgatcctacttctctccaatctccaaattcccttgctctgtgggtctgtgtctcttatgagcatgccaatctgaaacaagacaactatttggaatgtagctaaaggaaacagggaaccagtccattattttcaaattatccttccttgcatgaagtatgcagatgctgcaatcactgaaaacagagatggggcaagcagcagctctgggctgtgagtcactttatactatagtgccccgctattcctctgtggcactgacagaccctgcagcatggactaatttgcataggaaactaagcagcccctgaccatcaggtatgaccctggattcattttgggctgagaggtcagaaggatcatactcaccttaaatattatcctctccaagctgcaatactcccactgtccatcttagtcccaggatgttgtccagagctccagagaatcccttctcttggggcagaatcaccaagcttgctccctccagatttccacagtctccagtgggtatggggcacaggtgccattctgtgtctcaggtagagagaggcatcatgtcaaatgatatttgtagaagagggattcaaattctgaggctcctctccaatatttgacataattttctttgcttcttgtttcattctacaatctcacaatttaggagagtaattcttttgcggttgcattgttgacagcatttgggaaagtttttgtggttaaattaatttaaacaatcattttaatggtgtatttcttctgttcacgatagaacagtgaaagcagtcatttacacatcctgttgatgaaggtgttgtttaaggttcatgatccacacctaactctcaatctagttgaaatgaaaaggtgcagaattaggtggcacgtgagcaagctatgagagaggctcatgccaattactgtgggatttggagggagggagagatgacctctgctctagaccatgctccacgaagaaggagtgggagtttgtccatgggagactgcagaggaataaataccagcagcttctaactggggtggagtgagggctgcgggagcaaatccttggaacagaaaatggtgcatttgagctctcacagaggacagtggaaagaaaagtcatataggccacagtcccccggcaggttctgtttgctaatgatactattttgcaccagtgtgtccttatctcacaccactcctctgcctcttccagaataatctcttccctctccgctgctcagatcagcagatgtgccttgtgcaagttactcatttcacatagcaggccttttgctggtcttaattatatccgtcgttactttccacattagatactgtgtattgccttgcaaatgatcctactttttatattcctatttttcacttgttaatgcatatttgaccccttcttgaaggtcaagatgaccttggaaatataaggctatctcattatctggtcagtcttttactaatctttatttttatcgtaacattgactgtcattttgggggacatgtttgtttatcttgaatttcattgagtttcctcaaagcacgattttgagttctttgtcttaaaggtcgcatatctctgtctgtctagggttggtccctgttttattttttttttgagaaattaccgacttcaccagatgctgtaagctaccgggatagaggaagtttttgtgatttcatagcttgggtcttctttattcagggcagggaattttattttggggtcaagattgttgaaaatggcatagtgaagaaggtagagtcacaggagtttgctttatatacttgaggaagaagaaactgagatttgggaaaagtcaagaaaagagaacctgatcaaagatgactgaaaatagtaatagagcagaaaatgatgaaaagtcgtgttctgtgcaccacgaacgttcttctccccactccaaaagttttcgacacctagaaaatataaagaaaggactgatagcaactggcatcacgttgaggccagtctcagttgggaaaaacaccaaacagccgcttgtctcctgtaagaaccctgaagttggtcctgatgtcttctttctggactctggccctgatcttaactcctcagggaagtcaggtacttcccaaaatacagagaatgtcagattgcccttggttttgaaggagaaaatgctctgtgcttctccccaagataaattctgctttcctaggaatgctttctaacactcgtcatccagatctgattaccttctgtgaccaaacggtttccgaagattttgtaaaactcagcagcctttcacatcctctgcgtttgcactcactgtttccatggcccagaaggacatttattttcccacgacagggccagacactgctcatctgccaaggacgggctccctcccacctgtcttcctcttcacttctcatcccagcattctctggcactctatgatatcactctcttcactccacaggccaaaccaagaatataattggaactgcctgatgtttataacatgaatcaattcaagtccacttacatagacccctggaatacatgaattactatctcctctttacaagagacttctactacatgaaacatactggagagtctttagggataggctcagttttctacacaaattctgcaatatcctaaacaattctgtcttcacagtcataattgatgacttgttctctaaagtacccgaactgtgtttaaagtcagaatttgcaaatgttcttctgagaaaaaagaaaatcattacatcttagtgacatttatccagtctcacaatcttgctgaaaaatatttgtcatcataaccacactttccatgaccacatctttagatatttggtgagactggaaacatcaacaatggtccttctcagaaatcaacttaaaacactgaaagaaaaagtagctgtgctcagtaattgaacctcatcagccttgccaattaaaacacgttgtgtgcatgtgcttgtgagtgtgagtatgttttcttgtggagatgcaaatagtttctgtgggtggcatttactaagcatcactggatcactggtggagttcataggcactttcctaaccccagggagtgatgggaaatgtcacagccactgaatcggcctaagttatagctgatagggttgtttattttaaaattttacaaattcagaaataaatttgtaaactcaaaaaatggggccgggtgcagtggctcatgcctgtaatcctagcactttaggaggctgagggaggtggatcacgaggtcaggagtttgagaccagcctggccaacatggtgaaaccccatctctgccaaaaatacaaaaatttagctaggcgtggtggtgcacccctgtaatcccagctactcgggaggctgtggcaggagaatcacttgaacctgggaggtggaggttgcactgagccgagatcgcaccactgcactccagcctgcgtgatagagcgaagctccgtctcaaaaaaaaaaaaaaagaaaatcaggaaatcctctcttataaaacacatgatgtaaaatttactgatattaatttaaatacaaaataggaaaagattgggcctgattaagcaaagggagccagggaacaatgcagtgtttctgggctaggtgggcttgacatcctcacactgtttaattaagggtctgtgtaattttggctgctctctaagtgcaacaacggtttattttgtaataaaaagattggttcatgtgtccttttgcctcacttggcccagggtgaatttgaagatcaaccctaaattggccttttggggaaagcatagagggtgtgaggatgagggttgcaagggtgggagtggggcatctttgttcctgatttggacaatcttgaactcatcaggtcaggtgtgaatccatgagactgtggaatgttggccacttggtgacgctgtggctccacaatgctgcagggaaccctggagaggggtgggaaggtggccaagagaggagctgaagcctatgcttggctgcctgctggcttcaggggagtggtttgattcagagtggatccagagttaaacacaaactccccactaccagagaagagtagaggtgctggaggcctcagtttgcaccaaagagtagagtgtccctgtgtctgcttgggcagtggatggtgaaggagcttcagccacaagggctgggaatcagtgtcagggcagggacagggcaggtagaggaaagtaaggtgtgatgtgggcatgtggggcctgctctccacccaccaaacctttagtttcagggctgtgcgggacagatgcatggagcagctgagcctgggacctgccaaagcgtgcaaggggcagtggtggcctgcagggagagaaactcgcaaaggccagttcccgcaggaagctccagaaacattcctgcccccactcaggaagtgaccgtgagagacatgctgtcagccagaagggttcaggccctggagagctgataggcttttcccaggcactttctgctgcttctacatgtgatctgctttaatattcacataaattatgcaggataagtattattttacctgtttatgtatctgaaggaaatcagctgtccggggtctcatacttaataactggctgaagactgggtgcagtggctcacacctgtgaccctagcactttgggaggccaaggtgggcaaatctcctgagctcaggagttcgagaccagcctgggaaaatcggtgaaaccctatctctactaaaaatataaaaatttggccaggtgtggtggtgcacacctgtaatcccagctactcaggtggccgatgcaggagaatcgcttgaaccctggaggcagaggttgcagtgagccgagatcatgccattgcactccatcctgagcaacagagtgagactctgtctcaaaataaaacaaaataaaataaaataaaataaaataaaataaaataaaataaaagtctcaagcctgttgtgccaacacctctccttaaccccttctttgtagctctatcctttcacctgctttcccctttacaggtccccatcaacaggttgtgaagttcatgcctcatacgtaatcagtatagtctcttccctgagaagtccaaggaacatgtgacttccaggccaagcatatacattcatccttcattgagacaaaaaaaaaagtgtaattttctggccagccatgatgcttcacagctgtaatcccagcactttgggaggctgaggaggtgaattgtttgagcccaggagttcgagaccagcctgccaacatggagaaaccacgtctctactaaaaataaaataaatcagccaggcatactggtgggtgcctgtaatcccagctactcaggaggctgaggaatgggaattgtttgaactcaggaggtggaggttgcagtgagctgagattgtgccattgcaatccaggctggacaacagagctagactcccgaaagaaggaaagaaagaaagagagagagagaggaaggaaggaaggaaggaaggaaggaaggaaggaagaaaagaaaaagaaaaagaaaaaaaaaggggtggtaattttctgaactgtagacttcctgtaacggatgcaacatatcttgagaaaaaggaacactagtaattgttattcactagttaatttattttattcttttattcaataaacttttttgggggacctactgtgtataagataccctatgtcgtcaaatagaaaatgaaaaagaaaagtatctgcagatgatggcagattttaaaaaataaaaaaagaaaataaataaagaaagaaagaatattttaaaataaaaaatattttttggctatttataacactaaggtctgcatttattttcatttttcaattgttttatgtttattttcaattgttttatgtttagtgtacttagtttttgaatttatatatttcctttcttcttctcattctctctttggtttctccttctctcttctttgccagcttgtatttcttttttatttaaacttttggtaaggacatttaacatgagacctatcctctgaacagatttttaagtgtacaaaacagtatcatagtctacaggcacaaggttgtacagaagatctctaaaacttcctcatcctgcttaactgaaattttatacctgttgacagcaactccgcattttccccaactcccagctcttggaaagaaacattctcatctttgcttccatgagtttgacatggttgcctcatataaacagaaacatgcagtgtttgcgtttctgtgcttgacttgttcacttagaacaatgtcctccaggttcatctatgacacatatggaaggattgtttttcttttctaacccttaataatattccatgtttcagatctgcaggattaaatggatataacatttggctatttctatgaaactctctgtcatgtgagtggcagagtcatttgcagagctgcgagcactgagtttattcaggcacattcacagataaattctgctccatggagaacattcagaaaaaaataataatgccaacttttatttgtcaattcactatatgccaaataaaaatctttcatttgaaaaagttcaattaattagaaattcagctatcagaaaaaaaccttaagatgcaaatgctattctcattttacagatgagggaattggctcataggttaaaaaacttgaccaaattgaagagctattaggatacagtattgggacttcaacctgatctgtccaatttttgcatttataactctgtgctatagtgcatttcatagagagagatgcctaccttcaaaaatcagaatattggatcctacatccctttcagatcaactggctctaacaacatggaaagagatcagtttaccctggagacagtgatgtaaggagagatctctggctagatgccatgacactcagccctgactcccattctaacaccaacttgtaaagacctgaggccattcttgacatgctgcgtttagtttgtgttttgggtttttatttttttctgtaaaatgagatgactactgcccttatgaagagttgtacaaagatttaatatgacaaagtatctagcatatagtagattctagctattttgatttcctttgctaatctcaaacagcctcttccactgtgccaatgagcaaagacaaatatgaacacattctgcccaggaatcttaggttgaggactcagaactcacagaagtggaaatatatatgcttgatgattcatttgatgaaattacctgcagaacatagcgtacatgccttctcagacattttaaaatcagcacaattgatatataaattgtacaatataaacattacacatgttaaataaacagatcaatggttttatatatatatatatatatatatatagacatatatatgggttataaggatatatatgtatatccttataaccactatccctataaaaaggtctctatcacccagaaatctctctcatacccctttgccatgactctctccatctctgacaaccaatgatgtgatttctatcactggagaatacatttttttcaaaaaatctattagtaacattttaaaacctgtattgattaatccttttcaaatacatacatttaagagtgcaaggtgctcctcgaaagttttatggttttaaaagaggctaaatttctgtgagctacctgatccatgttagggacaatcctatctggagataggtaagaggatgaaatagcctcaaaattactttccagctggtggaagctcattctccaaaattatttattcatttttatttatttcttttatcatctacccactcattcaaattatttattttataatggtattgtgacaacaattaatcattttaatggaattattttgagttcccatatcacacatatttaattggccttcaagttcacacactgaatgcaacggcaccaaacaaaccatggtaacagtgactttgttgagagatggtgtcatatgtggaaaagggttctctttgcttttaccgcaagtatccaacccataaaacctgaactttgagctaggaaatctccctttttgttctggccctaccctgggcaccaggctccagcaccatgtctccttctgggttctggcccagagaagttcttggcacagttgtagcacccactcatgggcttgctggatcccagctgtgaatgacagtagcagggccccctttgctctgactttaatttctgtgtccttctcaaataagccctatagatgctgagtggcctgggcccctgccatgtgcttgggctgaaagaaagacagcacgtggggaggtgagcaggagcgaagttgaagcaaatctagaattgacatggaaaggactttggacataaatccctaggcagtggtgagccactggtcctactccaagtgaaacaacatgatgaaactgatattgtgttacagtaacattggtagtagtacggatctgaaaggagatagatttttgggtggcatgaatgattaggagacttctaaatatcctccatgaaagattagaaagggtttatgtaaagcattgtggaagacataggcttgaggctctggattatgttatctcttggaaagagtgttgggttttattctggaagggttaaatgtaggacttgctaggttctatttgagctttgcccttcctcttagggagccccagcctgtggtcatcattgctagtgcatggccttcccagggtcttagtgggaatcacagtgtattcgccacatcactccactgcaactgggtctgaatgccctggctcttctgaaatctctgcccatgtcttcagccttccagaacttgttctctgctcagccttctggtctgccaccctctgcatacacaatttaggatctggctcaggaaaaaaaaaaggggggtttcttacatataatttttgggttcctttttactaccctgtgtcttaaatcccagctgtcttggagtcagttatgtcctatcttcaatcacataaactaacgatatttggtacagacatgtttactgactttacttcacgttaccattccactcttcactcttctttcttgcaattcagacagtcctgaggtcattctccttcttcagatccatctggaattcagatgacttcaactcacctgtcacccaccctatgctttgagacatgtttatgttagctactgacctcagggtagtcaagcctctcattgtcattgttattcaaggtaggttgaatcccactaaaaaacaaaaatccttgaaatttggtttccttattgagagccacacaatgcaatcaaattctttttaattcaatttttttttcttttttggtggaagggccaagaactgtttccttgctgaagcagactcctattataataatttgaatactaacaacattaacctttaaatcaggttgatgttaggttcttatctaagaatgaagtatatccaactgtagcaggttgaaggtctctcatatatgtaacctgttcaggacgagacaattcaaccacttttcttaaattctgatctacatgcctttacattctttgctttaagggccacataaaaatactctgaaacaatttacacatcagaaaaatgctaacactttcctcctggcccagcacatctccaagttaaaaaaatctctaaattatcaacccatagtttaatcatggtaactcccttctacccccaacatagatttttatgtaactgatttgtaactacaaccttaaccgtacaatcacaattgtcattataaaatactaacaaacatgtgctattaacaatggatggttaaaatcacttagggattatgaatcatttcatttttgtgtttatttattatgtcagtttcaacctgatttccctttcccttgttccacacaccttgggttgttctttttcagcatcctgtgtatgttagctctaagcccagccaaggctcatgtccctccacttcagggacagagggtggctcatccctttcgtgctccctcagctccctccccggtgcctggttgctggttggcatcacagccatgcccttgaaagatgggcgctggtccacactgcatccgtggtcatgtagccaccctccctccacagaaccgagcaaaaagggctccaccgcgcttaggcattgagggaatggacattttgaatggtgctgtcttgtgtgatccctcagaggagaaggagatttcttgaatgggagtggtctgttgctgagagggatcctgaaagacacggggacagagacaggggtaggatccacataatgaggaagcagctgagaacaaaggagcccctgccagaggaatatccttggggggtaaaaagctggctctgccctttctccccagcccattcatcccagcccagacaattcaaatctgccttctatcaggacctagaaaggatgtaaaacggccgggtataaatatcccctgggtctggggaaactgtcaggagcagtgacatcacaggaaaaaccaccaaccaaggccaaggagaccagagcccagcacctcacccagaggaccccagtcagaggccccatctcagacccgaggctagcatgggctgcaggctgctctgctgtgcggttctctgtctcctgggagcgggtgagttgggttcacatcagctgtccttgaattcgaaactttttccttgtgatttcagcaacaagcctcctcctgggctctgcctgaattttgtccctttccccccgcagtccccatggaaacgggagttacgcagacaccaagacacctggtcatgggaatgacaaataagaagtctttgaaatgtgaacaacatctggggcataacgctatgtattggtacaagcaaagtgctaagaagccactggagctcatgtttgtctacaactttaaagaacagactgaaaacaacagtgtgccaagtcgcttctcacctgaatgccccaacagctctcacttattccttcacctacacaccctgcagccagaagactcggccctgtatctctgtgccagcagccaagacacagccttgcagagtcaccgctttcctgtgtagaaaccttaggggccctccaggaagctttgggggccaccaaagccttcgatgaacatttcctacaagagccccgacagaagattcagaacatcatagcacctttaatggcataaaatatctagcatatagtagaagcctagctattttgatttcctttgctgatctcagacaacctcttccaccacaccaatgtgcaaagacagatatggacacattctgccaagaaatcttaggttgaggactcagaagtcacagaaatggaaatatatatgcctgataattcatctgataaaattaactagaggatgtagcatacatatctcctcaggcatttaaaaatcaacattattgatctttaaagtatatgaagttaacaggacaccttttaaatgaacatatctgtgatttttgagcaacatatatctatatatgcaaccccacctctatgaagatgtatctgcatcacccagaaagtccctcactcccctctgcaatgcctctgtctgtcccagcaaccaatgatgtgacttctatcactggagagtcgttttgttggcaaatatttttaatgcaaatgtcaaacctcttctgaataatcctcttgaatacatagctaaatcatcaaggcagggaggagttcctggaggttttatggttttagaagtggttgaagccaggtgagctacctgacccatggtagggacaattctatctggagatggatattgtgccaaaataacctcaaaaggtcttttcggctggtagaagctgattctacaaaatttattcattttcattcgtttattttctcgtcaattcattcaatcaaacaattttatgttacgttttgacaaaagttaatcatctttaaggaaattattttgagttcccatcagacacacaagcagctgggctttgtgttcacacagtgagcatgctggggtcaagcaaaccatgatcacagtgacttcattgacagatgatgtcttattgggagaagggttctctttgacttgaccccatgtgtccaacccataaaacctgagccttaggctaaaatccatcttccttttctcaccctgccttgggcaccaggccactgtgctgtgtgtttctctgtctcctgaagcagagtcctgggcgcagatttggaacctattcgtgggcttgtttgatcccagctgtgactttcagtaccagggggtcctttgctgtgacttgaatttgtgttttctttactcttaagttccacagatgctgagtgacccagaccctggtcatgctcttgtgctgaaaggaaaccagcacatggggaggtgagcagtatatgaaacaaaatcatgtatttacaaccagtggcaagacttactggcaggtgctttgttcaaacactgttaggaatttgaagatcatggcagtagaatgtgaaaccaagtgcagggtccttccaaatgcaggcctctgtgcaccaaagatagacttttggagctcattttttttaaacaaaaacggaaacaacactctatgttcatggctgtaggccatgcgagaatatttttttaaattttaatttaatttttatttttccatatattattggggtacaggtggtatttggttatatgagtaagtttttagtgatgacttgcaagactttggtgaacccaccagctgagcagtatacactgcaccatatttgtagtctgttatccctcaccccctcctgctgtttccccaacacttccccaaagtccgttgtatcattcttatgcctttgtgacctcatagcttcgctcccaaatatcggtgagaacatgctatgtttggttttacatttctgagttacttcacttagaataatagtctcccatctcatccaggtagatcattccaaatgctgtttattcattcctttttatggctgtgtagtatttcatcatacatatatgatatatatatgatatatatgatatatatgtgatatatatgatatatatcatatatatgatatgtatatgatatatatcatatatatgatatatagatgatatatatatcatatatatgatatatagatgatatatagatgatatatatatcatatatatgacatatatatgatatatatatatcacagtttctttatccactcgttgattgatgggcatttgggttggttcctttttctttatcactaaattaatggcagcaataaatccagaacattcctcattaccctaaagtcagccctgtctcccaaactcccttacacatcaggacacctttgtgcccatagatcatgggcagtgcttggcagccaccactgtccacacagagagggtagtcagtagcgttaggtggttctgcttgctggggtctcaccccaggcacagaaagcaggagccctgggtggagctgaaagtgctcatctgggtttgtcaggagtcccatctgtcagtgaattcacaagaaacagaacaaaacaactccttcaatgttgatgagactgcccctgggatttggaaagctaataacagagaaaaccaatatagacaaaggattttaaacaggactatcggattatgatcaattaagcaaattagaaaaggatacttgaaggagtatttgggacacaggaatcaaaaacaccaggaagacatgaggagtttttccaagattgtagactatagcaatacttagataaccaataccagtgtattaatgagtaattattagtattattattttgagatggagtcgcactctgtcatcaaggctagaatgcagtggcatgatctcggcttactgcaacctccgcctccctggttcaagaattctggtgcctccgtctcccgagtagctgggactataggtgcacgtcaggatgcctggataatttctatatttttagtacaggtgggatttcaccatgttggtcaggctggtctccaactcctggcctgaagtgatctgctctcttcagcctcccaaagggctaggattacaggcatgggccactatgcacagccaagtaatttgtatcatcatgggaataaaaaatatacattgagttacaaactaattaccaaaagatatttaaaaaatggtagacttgcatcgattcagacaaaggcattcttcccatccaaactgttcactggtgcattgatcttgaatttgaccatctggggaaggggcgtggcctctcctgacagcaaggctctggggcccaggcagggagaatgaggtctcagaatgacgcccttgaaagacgtgttcccttttcaccaatgcacagacccagaggacccctccatcctgcagttcctgccatgagcctcgggctcctgtgctgtggggccttttctctcctgtgggcaggtgggtcctgggcggggccccttgtgtggatttcaaggcccatcccctttccactggagcagtagcatcagctttgtccttctctgcaggtccagtgaatgctggtgtcactcagaccccaaaattccgggtcctgaagacaggacagagcatgacactgctgtgtgcccaggatatgaaccatgaatacatgtactggtatcgacaagacccaggcatggggctgaggctgattcattactcagttggtgagggtacaactgccaaaggagaggtccctgatggctacaatgtctccagattaaaaaaacagaatttcctgctggggttggagtcggctgctccctcccaaacatctgtgtacttctgtgccagcagttactccacagtgctgcacggctgtctcctctctgcacagaaaggcaagggaaggtgctgccctcctccgcagcacagattcagcgatgcccttggtcctagcaccgaaaactttggagccccaatgggcccgggcggtgcgagccttcatctgtgccaggtgcctctgcagtcggtctcggccaggcctggatcggtcccaggacctcagatgtcttccttgttgccctccggtctttcctctgaggtgtccttttgggctagtgccaggggtttcccagctctgactttcctagtcattcacctgagtctgaggcctcctaggtgaaataggatttgtatttcagatccatctagactcccgtctctacctgggtaccacgtgctttcctctctctatgatttttcctcatgttgaaccctacggtggtctcagctgcagcctgcatttcctatattcacagtcgccctccaaggccttgctgggtttctcctccccgacctccctgcccttctctactccagccatgttgagagactccaaagtccatttcctgtgccctgggctggagccttcctttctgtagtggtcaacacctacctgtgcttcagatctcagcatcatcagccctagtgataatcaccattatgcttcccttggctcccagctgaggtcagtttccctctcataatctctcatggtatcatgtgtctgttaatcagtagaatttagcacagttggaatcttccaagtactttaaaccccatgaaggccaaggctatgcctgggttataaatcagcagctgagcctggcacaaggggagatgcatttcagagaatggatgagtcagtgatggagtgagtgatgagtggatggatgaatccataacaggagcaccctagatccattttacccttgcggagatctggctgtaagtacaagaactcttacccttttgattgctgggctacgggaggtccttgaaattaatggggagtcgctatcatgggcggccccaccttggtcaaagattcctcctgagtctgcagcaccagacctcctccaggtctctgtgctctccttcagactctttcccacaacaactctacacagatcagagatccctttccagaaacccatgcatagagttgtgttattttggaaccacttctggtaccaaaaactccattaggtttacatcaataaaacagaatcactaaaagtactatggagaggaggatttatgacaggagttagaccttatataaatgtagggggagctgaggaagagaaggtctggaggggagatatagctaggcagatttaattcatgattaatgtgaccgtgacctcttattctactcaaaggagagcatatgatttcaacaaaaaaatattgattttcctttgtaaaagtttgatccaaatagtgagctatttttgtcccataattgtcttaagttggctaatggtggaacaaatccgactttgatttccttgaaagaacaggaaaaaaaccgtcattcatatacagtcttacaggctctattttatggaggaagcataataaataggaaagagaaaatcagaattctcttctggaacctacattgggactgtcctcagagcaggttgtgatgtgaggaatcaaatctacaggggtatttcgcagcttggagcgcagcagactgttcccgaccccatgcatttgggggtgagaccagagacagttgaaaaactatggaatcttgacattctgcactctcaagcctggcctctccctgaatttcacagattaacatcagaccaatttattccgactattaaaagtattagaacaaaaaccaaggaggaccagtgagcagaagcaataaaccattaaaatggacatcctaaagatttaaaattttgccatcataagatgtgaacgtttgaagagctgcatttaaatgaatacaagaagggactgaaacaagaatacacacaaaaaagagacggcccgaaaccatcaaaaaacattaaagaaataatcaaatagaatgtctagaaatcattacgattactccacaaaacaaaatggaagctaaacagcagattcaatgcttctaaagagattgttagcaatatcaaaggaggatctcaagaaatcacctagaatgcagcacagaaaattaaatgtaaaatataaaaaaagtgaaggaacaaggaaaaaatgaagtttctagaatattagaaagcatataatgttttattgaaacttttcttactttcttgtatataactgacgtttcagaaagagaaaataaggcaaatgatctgaggtgattgtgtatgtgatgctagctgagaatgttcctgagatgtttgaggaccgaaatcctcgttcaagaattcagatgaattgcaagacaagtaggcaggtccctgtgaaactgcagaccataaatgacaaagagaagattttaacagcagtcaaaagggaaagataaataacttccagtggaatagaatgaaagaaataatcaaagtcaagaaagaggattaaaaataaccattcaataagaattgtagtcctcatttattgaagattgagattgatttaaaaaaatctataggacaggaaagaaaatatggaaaaccaaaagaattctgtgagtttgccaccaaggtatgttttctgaattatagttaacatgggtgggaaatgatcccagaagaaaggcatgagggcagtttgtgggggaacccatgtgatgggacaatcccattgggcacgtgtgagtgtgggaatggaggaggctggggcatgaatgggtatggcagagggcaccctgacttgcaggaaagacaatgagctcactccttggtgcctggtgttgggggcactgttggtgcatcctacagtacgtacccagcagacagaggagcgtctctgggatgagaaggtgaacttggagatgcagtgaggcctctgggtccagacagcataggtcaaaaaaagagaacctgatcaaagatgactgaaaatagaaatagagcaaaaaatgatatatgtgcctgatgattcatttgatgaaattaactagagaacatagtgtacatgcctccacagacattttaaaatcagcattatttatctataaattatacaatataaacattacacatgttaaataaacaaatcagtgagctatatatatatatatatatatatatatatatatatatatagagagagagagagagagagagagagacatatatatatgggttataaggttatatatgtatatccttataaccactatccctatacaaatgtctctatcacccagaaagttctctcacaccccttggcaatgactgtttccatctctgacaaccaaatgatatgatttctatcactggagaatacatttttctcaaaaaatctattagtaacattttaaaacctgtatcgactaatccttttttaatacatacatttaagagtgcaaggtggtcctggaaagttttatggtttaaaagtaaagttctgtgagctacctgatccatgttagggacaatcctatctggagatagataagatgatgaaatagcctccaaattactctccagctggtggaagctcattctccaaaattatttattcatttttattgatttctttactcatttactcactcattcaaattatttattttataatgatattgtgacaacaattcatcattttaatgaaattattttgagttcccatctgacacatacttaactggccttcaggttcacacactgaatgcaatgggactaaacaaaccatggtaatagtgactttgttaagagatgatgtcacatgtggaaaagggttctatttgcttttaccccaagtatccaacccataaaacctgagctttgagctagaaaatctccctttttgttctggccctaccctgggcaccaggctcctgcaccatgtctccttctgggttctggcccagagaagttcttggcacagttgtagcacccactcatgggcttgctggatcccagctgtgagtgacagtagcaggcccccctttgctctgactttaatttctgtgtccttctcaaataagccctatagatgctgagtggcctggacccctgccatgtgcttgggctgaaagaaaaacagcacctggggaggtgagcgggagcaaagttgaaggaaatctagaattgacagtggaaggaggagatgaggaatatcaattatggcattaagtaccagtgatagtagcaggactgtatcttatttccttaaacctctgatacttgtacagatagcagctgaccacaaccttgaagacctatttggactcaatggaaataatgcatgagtggactgtatcagttgcctctattaccacctcatactctcttggttccacctttgattccagccacagctatgatgaacagttctatgcagacactgacctgctccacagttaccgcacctcaccttcaatgtggccacgtgttcccaaaacacgctgttgctgaggcatgagacacattggtggtctgcatggcgcttgttcatgcacaatgaagtgtgagtgagttaatgtcctatggggcaattctcaaccactggagaatgagaactggtggataaaagccttggcattagtctcaggctcctagaaaggcctagtttgatagccagccacctatctatagagatggcccgattaatatgttttcctttgtattttctctgctttttgtttctctgattcagtatggatattttcacctgacctatcttccagtttatctagtcttttcagctttatctatccttctttaaaatatatatatatatatttttttttcctaaattttatgtatttcatatatttcagttctggaatttccacttcaatcttgactacagtattcagttgtctgctaaaattctccattttgtcatttcctttttgattatattaacatcagttattttaaaggcagtgtctgataacacatctctgttggtgtctatttcttttgtccgctttcttttttttaatttttggtcatgcaatgttgttttctcacacaatcaacaattcatttgaatgctaggtattgcatataaaaattacagagataatgaggctctgaatgatttcatcttcctcagaaaggattcatgtttgcttctgctggaaattgtagcagagacaggtcaccttaattgagttgatgactgagctggatcagagctgggattcagccttcctgatggcttctcaactttgctattagccattaaacttccaactagatttctggagtattttaccagcttattaaagtgtaaattacataacataatatttgcctactggaagtgtgtaatttaatgagttttgataaatttgtggagttgtgcaacaatcaccatgatctagctctaaaatatttcatcctccctacccagaaagttccttcgtgctcattttcagtcaatctctgcttctacccccagcaccaaggcctggggtctttgccaggctcctctcctactcagtagtcactgaacgtaaatgttctccaggccagaaaggtggtggatgctcctcaaagcctttggcccatcagtcctccctttcttcttagcttctcagccatcaaatgaaattgacaaatgaatttaagggaaaagtaggtttttttttttttttagatttatccgttttctatgatatccctatcttttacgctcttactgccccagtagctccaagtgccttcaaacatttatgttttatattttgttaagcttttctagttgtttttggtggaagtgttgttctgccactatccagtctattaactctgaaagtcagtttttatatttattaaagatgaagtgcaattgagttggtaggtttgtatgtttgtattatggtggaaacttcctgaagagagtgaggagtgaagcccctctagtctcccgtcacgtgtccctaataagacctctaccaccctgctgcctttgttccactactggactgagccttgacacgtttgaccctttggccacaaggaggagctgtgactctgctgagattcagagaacttggaggaaggagagacaattctctggatggcagagggttaatagaaagattgagtttatttacaacaagggaaaatgtggtctgcaaagaatgctagtcaaggctctaagtgtgagggttaaatacagactattcattttgctttgatatgcaggcgcttttgtgctatggaagagcctggactgtcagacttccactggagcgtgcatgggattagaaaggacaaggcatgagctggggagagtgggagcccacaagcagacacagatggaggaccccttcccaagaggaataagagaggctctgggtgctgggccgttgctccagctcagcccagtacagctgagccctgccatgaagtgagtctggccggccaggggtcccttggggatcttgcagagaataataactcagggaaatcttcttatgagaccaaaggtgacctacagccctgttctcctcactctaaattatcggggaattaagctagaaagaagttttttcttgttcctcttctggatggtcctctgagtttttggagcaggagctccccacagtgataggaaacccctctcctaggcctgagcaaatgtttctatcaaaacagcatcaccagactcccttccagcttccatttccaagttctttccctatctacgaagaaccgtggaagctagacttgtccagacgtcaaaggatctgatgatgccaaaacacctggagataggaaagaaggtggcattgacagactgccaggatgcacacctgaaacgcactttgttttcactacaggctcgtgtttcacattttaaaaaagcatttggaacttccctgacttcttggaaatccaaaaatacaacaaagttacattttagtagactctagtcagtcatctggcaggaaaaagcttcaggatataaataaaagtataaatagtagtatatacatatatatactaattatttatatataaccttacatgtatatatactacatacatgtatgattatgtatacatatactatacataatatagtgtatacgatacatgtactatatacaatatatactatattatatatattctgtattacatatagtatatgtatatgcatgtattaccatatatgtatatatacatgtatgtatacgcatatattactatatatgtatatatacatgtatgtatatgcatacattaccatatatgtatatatacatgtatgtatatatgtaggctggatgactagagcctacatcaaatgtaactttgttgtattcttgaatttccaagaatcaagggaaatttgaaacgtatatatccaagtatgtagtgtgtgtgtatatatatatatacatacatgtatggtaatgtatatacatgtatataatatatactacatgtaatatacatgcatatattatatatacatgtatatatatacatgtgtatattatatatacatgtatatatatacatgtgtatattatatatactacgtgtaatatacatttatatatacatgtatttatatataccactaccaaatacatgtgtatatatatactaccatacatgtgtatatatatacactatttttatatataatatatactacgatacatgttctagcatattgcctgaagtaaaagtccagccaaatagtttaaaaggaaaaccatgagccttcctgtgaagattaattttgcatttcatcttgaaatggaacaaagaaatctactgaagatagtcaattcacttctatatacggaagtctacatttatcagctttctacagtatgagcgactttcaaatctcctaaaagttacacaaatcagaatatgcagaacacacatttctaagctcaatattaaatatgtaaagtgactaacttgaacgtaagagttggacgttcagggtcctcctgtgatttcttcattcccaccatcacaaaacatctacaccttcttctcagtaacaaaaatgagatgacataaaatcatttttcatagttaataaataatacctatgcatcatgacattgcattgattttttgttaatggttgttttcaaatgactataaattaaacatttataatctatacaatagaaataataaatgtaaatattttaagtggatacatgagattttagtagccaaacaggctcacacctgtaattccagcactttgggaggccaaagtgggaggatcacttgggcccaggagttcaagaccagcctgggcaatatagggagatcctgtctctgtattttaaaaaatagttatacagaaaagtaacatgaaatagtctgcaacaggatgtcctatctgggtttgatctgaatttccatttagaaaacagacaggcactggtccatctgcgggcataggttctcatgaattgatgtgcatgttgacttttgtattttgtcaaagttaaaggagatattttgatcagagtcagagccacaagtaactagcaggaaactgagtgggatggaggttatgccatggtccttgcttccttgcagagctaagaaaccagttgtgagcaccagcgaaaagagacaaagtcagatgaaactgaaatcttcatgggactctgtgcccaagaaaaccagcttgacaggattgggcacaagagctattccttccatcctacgctgccagagcacacagcacagtttcccccatgagctcttggggagctggaggagggagatagctgtgctgggcggagtcgtattcccatgggaagtccaaaaagtagaggcagggatggaggttttccttctagaaagagtggaagattttgtttacaaacgtacccatacacatgcctttctcccgaagacccaaactttggggaattgcttaaatataacaaggaggttaaatattggacagccaaaaataggaccgaagccaatctcttctgaagtaggtgtagtcactgtgcattagtcagatattcaaatgagcaaagattcaagaggaaaaaaaaaagcattattggaaaaggaagcaaaagatcaagagaagaaaaccagcctgactctgagaggagagcccaaaagggagaggaagggaggaggtcctcagatcccgggtagggagcagggagggaggggtacaggcacaggaatgactgtcagagacacatcctggaggccacaagtccactctctcaactattcccagaaattccaaaaactcctttaaagaagccagtgcagggcatgaaagggaggagccatgctagaggagatcctgggaatgggggaatgattacaggctgtgacctcaatggcacagcacctctcagaggcagtggaaaccacagcctagtcttctcaccactgcagaccagaatcctgccctgggccttgcctggtctgcctgactcggccatgggctgcaggctcctctgctatgtggccctctgcctcctgcaagcaggtgagtcctgggcccaagtgacaagatcctgttggagtccccgagccttttcaccatgacaacaacaggaggctacctcctgggatttgcctgaattctgcttctttcctttacagatccactggacacagccgtttcccagactccaaaatacctggtcacacagatgggaaaaaaggagtctcttaaatgagaacaaaatctgggccataatgctatgtattggtataaacaggactctaagaaatttctgaagacaatgtttatctacagtaacaaggagccaattttaaatgaaacagttccaaatcgcttctcacctgactctccagacaaagctcatttaaatcttcacatcaattccctggagcttggtgactctgctgtgtatttctgtgccagcagccaagacacagccttacagagccactgcatccctgtgcacaaacctcccggctcagccaggaagctgtgggccgtgtgtgcacctgcacccaaggctccagtctccattccctgatggcctctgatggagtttcagtctgtagtacagcctctgccagtgcacctgatgtggcaattctccattttatgtacacagaactctcagaattctgtttatcagctaaagcaggggttcacaacaaagtcagcaaagtatcagagctcaactaacaaaacaggagcctgtcccatgcactgaaggtctttactgatgggagaagccatttcttgtctttgtctgctgcacatatgggtccatattttactaatgttatgattataaacacactgtaggcaaaaatggttgatgagcctaagcataaagaagaggggaaggaaagtatttctaagatcaagagacaatttggattatcagtgagtattttgtttgacagagaaatattttgagaggcgtgaaattccatggcaataggtaaactggaaagtgttgaggagaagtcagtggaggcagccttgtgcattgtcggctccttctcttcaagaagggtgaccagcaagagtttctcccaattctgatgagtgtcatcttgaactctcctcaagagcaggtgacagctggatgacaggggatattgggagacatggaaaggaatttggacacaaatccctaggcagtggtgagccactggtcctactccaagtgaaacaacatgatgaaactgatattttggtacaggaacactggtagtagtatggatcagaaaagagatagatttttgggtggcatgaatgattaggagacttctaaataccctccatgaaagactagaaatcgtttatgtaaagcattgtggacgacataggcttgaggctctggattatgttatctcttggaaagagtgttgggttttattctgggacggttgaatgtaggacttgctaagttctatttcagctttgcccttcctcttagggagccccagcctgtggtcatcattgctagtgcatggccttcccagggtcttagtgggaatcacagtgtattcgccacatcactccactgcaactgggtctgaatgccctggctcttctgaaatctctgcccatgtcttcagccttccagaacttgttctctgctcagccttctggtctcccacccttctgcatacacaatttaggatctgactcaggaaaaaaaagggggttttcttacatataatttttgggttcctttttagtactctgtgtcctaaatcccacgtgtcttggagtcagttatgtcctatcttcagtcacatatactactgctatttggtacagacatgtttacttgactttacttcacgtttgccattccactcttcactcttctttcttgcaattcagacagtcctgaggtcattttccttcttcagatccatcccatattcagatgacttaaaatcacctgtcacccatgctgtgctttgagaaatgtttatgttagctactgacatcagggcagtcaagcctctcattgtcattgttattcaaggtaggttgaattccattaaaaaataaaaatccttgaaatttggtttacttattgggaaccacacaatgatatcaaattctttttaattcaattttttttcttttgtggtggaagggccaagaattgtttccttgctgaagcagactcctatcataataatttgaatactaacaacgttattttaatactaacaacgttaacctttaaatcagattgatgttaggttcttatctaagaatgaaatatatccaaccgtagcaggttgaaggtctctcatatatgtaacctgttcaggacgagataattcaaccactttccttaaactctgatctaaatgcctttacattctttgttttaagggccacataaaaatactctgaaacaatttacacatcagaaaaatgctaatactttcctcctggcccagcacatctccaagttaaaaaaatctctaaattctcaacccatagtttaatcatggtaactcccttctacccccaacatagatttttatgtaactgatttgtaactacaaccctaaccctacaatcacaattgtcattacaaaatactaacaaacatgtgctattaccaatagatggttaaaatcacttagggattatgaatcatgtcattcttgtatttatttgtacttattctttgtgtttatttattatgtcagcttcaagctgatttccctttcccttgctccccacaccttttgttgttccttttcagcatcctgtgtatgttagctctaagcccagccaagccccatgccctccacttcagggacagagggtggctcatccctttcgtgctccctcagctccctccccagtgcctggtggctggttggcatcacagccatgcccttgaataatgggcgctggtccacactgcttctgtggtcatgcagtcatcctccctccacagagctgggccaaaaagggctccactgcccttaggcattgagggaatggacattctgagtggcactgtcttgtgtgatcccacaggacagaaggagattccatcaatgggagtagtctgttgctgagagggatcctgaaagatagggggacagagacacactgggaggatccacataaagaggaagcagctgagaacaaaggagcccctgccagaggaatatccttggggagtaaaaagctgactctgccctttctccccagcccattcatcccagcccagacaattcaaatctaccttctatcaggacctagaaaggatgtaaaacggctgggtataaatatcccctgggtctggggaaactgtcaggagcagtgacatcacaggaaaaaccaccaaccaaggccaaggagaccagagcccagcacctcacccagaggaccccagtcagaggccccatctcagacccgaggctagcatgggctgcaggctgctctgctgtgcggttctctgtctcctgggagcgggtgagttgggttcacatcagctgtccttgaattccaagctttttccttgtgatttcagcaacaagcctcctcctgggctctgcctgaattttgtccctttccccccacagtccccatggaaacgggagttacgcagacaccaagacacctggtcatgggaatgacaaataagaagtctttgaaatgtgaacaacatctgggtcataacgctatgtattggtacaagcaaagtgctaagaagccactggagctcatgtttgtctacagtcttgaagaacgggttgaaaacaacagtgtgccaagtcgcttctcacctgaatgccccaacagctctcacttattccttcacctacacaccctgcagccagaagactcggccctgtatctctgcgccagcagccaagacacagccttgcagagtcaccgctttcctgtgcagaaaccttaggggccctccaggaagctgtgggggccaccaaagccttcggtgaacatttcctgcaagagccccgacagaagattcagaacatcatagcacctgctcattcatccatgtggcaacgttacatcctatgctcatatttagagtgtgggttttctttagcgtgtgactctgccctgttaactgatttgaaaaatgataaacacattcagatctagtctttttaaaatccctttttaaattgtaaaataaagcaagcatgctataaggggattgtttggtttaagatgttataagaccctctcaacaaccacctgcgtcactacagagtcataccctgcactggaccacagagtgtcctgtgaggagccaagttcttctgacactttatgcctggtggtctccatgcctctctttctcagtaaccaggggtccattctgtcataggttgctgacacccaaggtcaagcagcactgggtttgggggaatcatagaggcaacttccaggcaagggtcccagggcgggagccagctggagagaacagtagacaactgagcttttggggaatgggtttgagaaatatctgtcaacccaattctattattctatcttccatcttgtctcttctctattgttcttatttaaactccaagctagagcgtaaattccagccctgatcaaagctccatatccctcacagacaccttctctgaaccccgcaggcagcaaatgtgcctctgtccactcccatttgtgtgggcggtaagccacccaagtcctgaggcaagagaccgagggcacgagctgttccagtataataaagaaaatatataaaataagaatagttatactagtaatagattatagatatgatggtatacaaatattatgaataatcagtttgtagcattactcttcattccaatattataataatccttgctctacaattataacctaggaaaaaccaggccatacagagataggagctgaaggggcacggtgagaagtgatcagaagacaagagtgtgagccctctgtcatgcccagacagggcccctagagggctccttggccttgtggtaaccccagagcctgggaggaagccccttgcctagaggaccttggtctagccttagcgtcagtgcctagaaaaagcacccattacttagccgaccaggaaagggagtctccctttccccgggggagttagagaagatattgcgtgtggctaggcttggtgctcacgcctgtaatcccaacactttggaaggctgaggtgggtggatcacgaggtcaggaggtcaagacgagtctggccaacatagtgaaaccctatctctactaaaaatacaaacaattagcgggttgtggtggtgtgtgcctgtaatcccagctacttgggaggctgaggcaggagaatcacgtgaacccgggaggcagaggttgctgtgagctgagatcttgtcattgcactccagtctgggtgacagcgtgagactccacctcaggaaaaaaaaaaaaaaaaacgataccgtatgtgtgaatgtgtgtgtgcctatgtgtgtgagtgcgtgcatgtgtgtgcatggatgtgtgtgtgcatgtgcatgtgtgtggatggtgtggatgtgtgtgtgtgtgtgtacgtgtacatgtgtgtgtgttcttgtggaaactcacccacatggacccaggttctctgggtggcattactgagaggtgctgggtcactggtagagctcataggcagttctggggagtgacaggaaatgtcacagccaattgaatctgcctaagttacagctgatagggttgtttatttcaagattttgtaagttcagaaatagatttataaaaaatccaagaattttctttctaaaatgcactacctaaaacttgctgataattcatttaaatacaaaatatgagaacatgggtctgattaatcaaaaggaacgattgaatacagtttccaggatagggctgtttgatatcttcacactgtttaaatctgtggcctgtatttttcaggctcctctcgtccatcctagcatactaattgcaatgctgtaacattgtttattttgcaatcaaaatgttggttaatgcttgcttttgctagctaaaggtgaactttcagatcaaccctatattggcccttctgggcaagtatacagagggtgtgtgtgagagggtggggattgcaggagtgagggcagggcatctctcttccttctctggacaatcttgagttcatcaggccaggtgtgaatccgtgagactgtggatctttggccacttggaggcgctgtagctccacgatgctgtaagaaaccctgggcagggctggagagtggccaggagaagagggttgaaggggatgcctggctgcctgctgccatcaggggccctttgggattccctgagtgggcctggacatgtggaattaagcacagacccctcactgccaaagaagggtagggatgctagagtcctcagtttgtaccaaggagggagggtgtctgcctctgcgtgggcagtggagggtgaaggggctggggtggcaagggctgggaataagtgtcaggcctgggacagggaggacacaggaaaggcaggtgtgatggggcatgtgggggctgtgctccacccgctccacctttagtttcagggctgtgtaagacaggaagatctcatggagtagcaaagcctgggccctgccaatggttgcagagtgcaggggtggccggcagagggagtaactgggaaaggccagttccccaaggaaatgccagaaactttcctgccccattcagaaagtgactgtgaggcgggtgcttccagccagaggggctcaggccctgctgagctgacagcgttttctttcccagacattctctgctgcttctatatgtgatctgttttaatgctcactgaaatcacaagtatttattattttgactgtttttgtatctgagggaaggcagctgtccctggtctcatatttaataactggctgtcgtgtgctctccaacacctctccaccctccctactcagtacatctgtcccgtcatctggcttcctctctccaggtcccattagcaggaggggaaggtcatgcctcctatgtgaccattagaacctcttccttgacaagtccaagaaacacgtgacttccgggccaagcatatccattcattcttcattgcagccaaaagaaagatgaaattttctaccctgtagactttctgtcactaatgcaatgtaccttgaggaaaagtaacatgaataactgttattcattagttaatttcttttatatcctttattcaataaagtctttgagaccctttctttgtatattttatgacataaaataaaaaatgggaaaaattgtttaataacaaatatttcttactttttagagtattaaggcttaaatttattttgttttattttagttttatattcaaagtactttactcagtttctgaattacaaaaatttccctttctttctctgtctctctttagctacctccctcattttttttgccagcattttaatttaatgtggtaggaacatgtaacatgagatctgtattttaaatagatttttaagtgtacaatacagtattgtaatctacaggtacaaggttgtacagaagctctctagctcttacttatcttgctgaactgaaattttatacctgctgacagcaactccccattttctccattcccagcccatggatatcaccatttttatctttgctttcatgagtttggcttttaggtagcctgctataagcagaatcagggagtatttgtctttctgtgccaggcttagtcacttatcacagtgtcctgcagctttatccatgttgtcacgagtgacggggttttcttctttttaatgcttaataatataccattgtatgaatataccacatttatggactttgactgtttctatgaaactgtctgtcacataagtgggagagtcatttgcagaactgaaagcttggattacatgaatgggcattcacatttcaattctactccatgggcaagacggagaataaaataatgattccatcatttactcttactttgctatacacaaaatagaagtcctgcttttgggaagtttcagttatttagaaattcgactgtcagaagaaaaccctaagacacaaatgcttttctcattgtacacgtgagagaattggctcattggttaaataacctgaccaaattaaatagctattaggatgcagtactgatcctccaaccctgcccagtctaagttccatgtttatagctctatgctataaaatatttcataaagctgccaacctagaaaacattggaaagttttcccctacatcccctttaggcctgctggctctaatagcatcatagtcagagatcagtttaccctggagatggtggagtagggaaagaagtctgaagaggcaccatgactccccgccctgactcccactctaacaccagctcatcaagacctgaggccagttcttaacgggttaacttaagtttttcagtttttttttacctataaaatgagactactactgtccatcagcagagttctagataacctttaatggcataaaatatctagcatatagtagaagcctagctattttgatttcctttgctgatctcagacaacctcgtccaccacaccaatgtgcaaagacagatatggacacattctgccaagaaatcttaggttgagggctcagaagtcacagaaatggaaatatatatgcctgataattcatctgataaaattaactagaggatgtagcatacatatctcctcaggcatttaaaaatcaacattattgatctataaagtatatgaagttaacaggacaccttttaaatgaacatatctgtgatttttgagcaacatatatctatatatgcaaccccacctctatgaagatgtatctgcatcacccagaaagtccctcactcccctctgcaatgcctctgtctgtcccagcaaccaatgatgtgacttctatcactggagagtcgttttgttggcaaatatttttaatgcaaatgtcaaacctcttctgaatagtcctgttgaatacatagctaaatcatcaaggcagggaggagttcctgggaggttttatggttttagaagtggttgaagctaggtgagctacctgacccatggtagggacaattctatctggagatggatgttgtgccgaaataacctcaaaaggtcttttcggctggtagaagctgattctacaaaatttattcattttcattcgtttattttctcgtcaattcattcaatcaaacaattttatgttacgttttgacaaaagttaatcatctttaaggaaattattttgagttcccatcagacacacatgcagctgggctttgtgttcacacagtgagcatgctggggtcaagcaaaccatgatcacagtgacttcattgacagatgatgtcttattgggagaagggttctctttgacttgaccccatgtgtccaacccataaaacctgagccttaggctaaaatccatcttccttttcttaccctgccttgggcaccaggccactgtgctgtgtgtttctctgtctcctgaagcagagtcctgggcgcagatttggaacctattcgtgggcttgtttgatcccagctgtgactttcagtaccagggggtcctttgctgtgacttgaatttgtgttttctttactcttaagttccacagatgctgagtgacccagaccctggtcatgctcttgtgctgaaaggaaaccagcacacggggaggtgagcagtatatgaaacaaaatcatgtatttacaaccagtggcaagacttactggcaggtgctttgttcaaacactgttaggaatttgaagatcatggcagtagaatgtgaaaccaagtgcagggtccttccaaatgcaggcctctgtgcaccaaagatagacttttggagctcattttttttaaacaaaaacggaaacaacactctatgttcatggctgtaggccatgcgagaatatttttttaaattttaatttaatttttatttttccatatattattggggtacaggtggtatttggttatatgagtaagtttttagtgatgacttgcaagactttggtgaacccaccatctgagcagtatacactgcaccatatttgtagtcttttatccctcaccccctcctgctgtttccccaacacttccccaaagtccgttgtatcattcttatgcctttgtgacctcatagcttcgctcccaaatatcggtgagaacatgctatgtttggttttacatttctgagttacttcacttagaataatagtctcccatctcatccaggtagatcattccaaatgctgtttattcattcctttttatggctgtgtagtatttcatcatacatatatgatatatatatatgatatatatatgatatatatatcatatatatcatatatatatgatatatatatatatcacagtttctttatccactcgttgattgatgggcatttgggttggttcctttttctttatcactaaattaatggcagcaataaatccagaacattccttattaccctaaagtcagccctgtctcccaaactcccttacacatcaggacacctttgtgcccatagatcatgggcagtgcttggcagccaccactgtgcacacagagagggtagtcagtagcgttaggtggttctgcctgctggggtctcaccccaggaacagaaagcaggagccctgggtggagctgaaagtgctcatctgggtttgtcaggagtcccatctgtcagtgaattcacaagaaacagaacaaaacaactcttccaatgttgatgagcctgcccctgggatttggaaagctaataacagagaaaaccaatatagacaaaagattttaaacaggactatcggattatggtcatttaagcaaattagaaaaggatacttgaaggagtatttgggacacaggaatcaaaaacaccaggaagacatgaggagtttttccaagattgtagactatagcaatacttagataaccaataccagtgtattaatgagtaattattagtattattattttgagatggagtcgcactctatcatccaggctggaatgcagtggcatgatctcggcttactgcaacctccgcctccctggttcaagaattctggtgcctccgcctcccgagtagctgggactataggtgcacgtcaggatgcctggataatttctatatttttagtacagatgggatttcaccatgttggtcaggctggtctccaactcctggcctgaagtgatctgctctcttcagcctcccaaagggctaggattacaggcatgggccactatgcacagccaagtaatttgtatcatcatgggaataaaaaatatacattgagttacaaactaattaccaaaagatatttaaaaaatggtagacttgcatcgattcagacaaaggcattcttcccatccaaactgttcactggtgcattgatcttgaatttgaccatctggggaaggggcgtggcctctcctgacagcaaggctctggggcccaggcagggagaatgaggtctcagaatgacgcccttgaaagacgtgttcccttttcaccaatgcacagacccagaggacccctccatcctgcagttcctgccatgagcctcgggctcctgtgctgtggggtcttttctctcctgtgggcaggtgggtcctgggcggggccccttgtgtggatttcaaggcccatcccctttccactggagctgtagcatcagctttgtccttctctgcaggtccagtgaatgctggtgtcactcagaccccaaaattccgggtcctgaagacaggacagagcatgacactgctgtgtgcccaggatatgaaccatgaatacatgtactggtatcgacaagacccaggcatggggctgaggctgattcattactcagttggtgagggtacaactgccaaaggagaggtccctgatggctacaatgtctccagattaaaaaaacagaatttcctgctggggttggagtcggctgctccctcccaaacatctgtgtacttctgtgccagcagttactccacagtgctgcacggctgtctcctctctgcacagaaaggcaagggaaggtgctgccctcctccgcagcacagattcagcgatgcccttggtcctagcaccgaaaactttggagccccaatgggcccgggcggtgcgagccttcatctgtgccaggtgcctctgcagtcggtctcggccaggcctggatcggtcccaggacctcagatgtcttccttgttgccctccggtctttcctctgaggtgtccttttgggctagtgccaggggtttcccagctctgactttcctagtcattcacctgagtctgaggcctcctaggtgaaataggatttgtatttcagatccatctagactcccgtctctacctgggtaccacgtgctttcctctctctatgatttttcctcatgttgaaccctacggtggtctcagctgcagcctgcatttcctatattcacagtcgccctccaaggccttgctgggtttctcctccccgacctccctgcccttctctactccagccatgttgagagactccaaagtccatttcctgtgccctgggctggagccttcctttctgtagtggtcaacacctacctgtgcttcagatctcagcatcatcagccctagtgataatcaccattatgcttcccttggctcccagctgaggtcagtttccctctcataatctctcatggtatcatgtgtctgttaatcagtagaatttagcacagttggaatcttccaagtactttaaaccccatgaaggccaaggctatgcctgggttataaatcagcagctgagcctggcacaaggggagatgcatttcagagaatggatgagtcagtgatggagtgagtgatgagtggatggatgaatccataacaggagcaccctagatccattttacccttgcggagatctggctgtaagtacaagaactcttacccttttgattgctgggctacgggaggtccttgaaattaatggggagtcgctatcatgggcggccccaccttggtcaaagattcctcctgagtctgcagcaccagacctcctccaggtctctgtgctctccttcagactctttcccacaacaactctacacagatcagagatccctttccagaaacccatgcatagagttgtgttattttggaaccacttctggtaccaaaaactccattaggtttacatcaataaaacagaatcactaaaagtactatggagaggaggatttatgacaggagttagaccttatataaatgtagggggagctgaggaagagaaggtctggaggggagatatagctaggcagatttaattcatgattaatgtgaccgtgacctcttattctactcaaaggagagcatatgatttcaacaaaaaaatattgattttcctttgtaaaagtttgatccaaatagtgagctatttttgtcccataattgtcttaagttggctaatggtggaacaaatccgactttgatttccttgaaagaacaggaaaaaaaccgtcattcatatacagtcttacaggctctattttatggaggaagcataataaataggaaagagaaaatcagaattctcttctggaacctacattgggactgtcctcagagcaggttgtgatgtgaggaatcaaatctacaggggtatttcgcagcttggagcgcagcagactgttcccgaccccatgcatttgggggtgagaccagagacagttgaaaaactatggaatcttgacattctgcactctcaagcctggcctctccctgaatttcacagattaacatcagaccaatttattccgactattaaaagtattagaacaaaaaccaaggaggaccagtgagcagaagcaataaaccattaaaatggacatcctaaagatttaaaattttgccatcataagatgtgaacgtttgaagagctgcatttaaatgaatacaagaagggactgaaacaagaatacacacaaaaaagagacggcccgaaaccatcaaaaaacattaaagaaataatcaaatagaatgtctagaaatcattacgattactccacaaaacaaaatggaagctaaacagcagattcaatgcttctaaagagattgttagcaatatcaaaggaggatctcaagaaatcacctagaatgcagcacagaaaattaaatgtaaaatataaaaaaagtgaaggaacaaggaaaaaatgaagtttctagaatattagaaagcatataatgttttattgaaacttttcttactttcttgtatataactgacgtttcagaaagagaaaataaggcaaatgatctgaggtgattgtgtatgtgatgctagctgagaatgttcctgagatgtttgaggaccgaaatcctcgttcaagaattcagatgaattgcaagacaagtaggcaggtccctgtgaaactgcagaccacaaatgacaaagaaaagattttaacagcagtcaaaagggaaagataaatatcctccaggggaatagaaagaaagaaataatcaaagtcaagaaagaggattaaaaataactgttaaatcagaattgagattgataaaaaatacctacaggacaggacaagaaaatatggaaaaccaaaataattctgtgagtttgccaccaaagtatcttttcagagttatagttaacaagggtgggaaatgatcccagaagaaatgtatgagggcagtttgtgagggaacccatgtgatgggacaatcccgttgggcacatgtgagtgggggaatggaggaggctggggcatgaatggggatggcagaggggaccctgacttggaggaaagacaatgagctcatcccatggtgcctggtgttgggggcactgttggcacatcctacagaacgtgctcagcagacagaggagcggctgtgggatgagaaggtgaactcggagatgcagcgtgaggcctccaagtccagacagcatgggagcccaaagcgatgtcccatgcaataacgttgtttacaaggagcttataaatatttaaagtagtcacccaagtgtggtctaatataaatcctgtgttcctgaggtcatgcagattgagagaggaagtgatgtcactgtgggaacttccgtgtaaggacggggcgtccctcctcctctgctcctgctcacagtgatcctgatctggtaaagctcccatcctgccctgaccctgccatgggcaccaggctcctcttctgggtggccttctgtctcctgggggcaggtgagtcctcagacaccaaccattctcattgtgtgtgtgtgtgtgtgtgtgtgtgtgtgtgtgtgtgtgtgtgtgtaggggtgggctgtgtgcattcgtgtgatgactaaaattattttcctcattctgttcccaactttgtctccacagatcacacaggagctggagtctcccagtcccccagtaacaaggtcacagagaagggaaaggatgtagagctcaggtgtgatccaatttcaggtcatactgccctttactggtaccgacagagcctggggcagggcctggagtttttaatttacttccaaggcaacagtgcaccagacaaatcagggctgcccagtgatcgcttctctgcagagaggactgggggatccgtctccactctgacgatccagcgcacacagcaggaggactcggccgtgtatctctgtgccagcagcttagccacagcatggcacagtcgcctccttcctgctcataaacctcatccttctctctccttgcagctcctagacacccttaacagaggcttctctttgcttctccctccccatgggaaacaagtagatttggacctcagcttgtcctttgggtagaaagagaccacagatttacccttaagacacagtaactgtaaatgtgggtggtggaagcaatcgtggcccaccgggctattggagtcctcagagccagctcattgctctaaggcaagcactgggtgtcttagccttggccttcagggctgggacacacagtcttctttggggcctgggaggttgctgcccacatagagaagcttcgggcatggctgaggaacaggtgtcttcccctacatgtgttggggcatctgcaaggtctgaagcttcatccacaagaacattctttcttctgaagcctcttctgttacattggaagttttctgcaatacaagagcaaaccattcttcctgtttgatttaaaagtctttgtggcttttgtggccattacttggtgaatacagccaagataacaataagacttcgtttcttctgcctagtgtaagcaatgcgagttctttattttgttttcatttaccactgctcctgtcctgagagactgaagcatgcgtccactactgctccagtatcaacttggttccctaggaaatcgggtttctagaacctgaatgctgacaaataagagttgtgtacatgtataccatgcaacctgcgtttaaaaatgtatgtacatggtgaagtgactaaatctagctaattaacatatgcagtacctcaatccttatcctttcctgtggtgagaatacttgaaatgtactctgttagcaatattccagaatacaatccactgttactaactttagtcactgtgttgtacaatagatcttttgaacttcttcctcctatttgagtgaaattttgtatcctttaaccaacatctccccagcaccccatctccatcccaacctctggtaattgctgctctagtcttttgatttgaaataatttccctgaggtctttaacttgagaagatggagttttaaaaacaataatgcttatattacttttgttttgtttgttattttacatattgcaatatagtgtttgttgcaaatataaatgagtatactgtaataaaaattcttcacctctctttgagtgaagctacatttcacatatatgaaatttcaagctgtggtcagagctgacatgattatggatcatgggtttctgggagtcctcagagacagccctatacacaaaggttaagatagattatcccagacccagccaggacagaggtgccctgagtcctgcagagctggttggggaattatagttccctaaattcacttatcagaaattgtggtagctcagataccaaatttctttctctagcaaatgatgatcgttggcagggattgttctgaatccattctaattgttctatcaacagatcattccttttttagttgccctgtgtgtcctgggagtgaataagtcccaggcacagatgggaatttcctgaccttaggatgctgttccaaggacttccttgctagaccctgtctccagcttttcccacctttatcctcatgacccctaagacaaatggtcctaataatggaccagctctgaaacttaagattgaacagaacacaaaccacaactgtaaacactgatgctgaaagaagtggtaaaaaaaggtgagcagggtttcccacctgcactgagagttaacatacaaggacagcaaagggaaggttttattaataagcaaacaagaagcaataaaggccctgctccattgaatgtaactaatctctttgagttaaaaaaggagcacgtcaataaaagtatttcaaatcaaagtctagaagtttccaaaccagccagcacaaccctgagagctctgtgctctcagcaacttcagagaactcatcaatcctttctgggctcaaacttccctttgtccactcgaagacccagggtcacactctcatcctattacaaaaacaatgggctttgctatcgttgctgatgcctcatttctaggagttgagtattaagcactgaagagctttgaaagttgggcttctgagtcaattgatgtgctggagccaacttttctgactcacgagagacaaataggcacactcttcccagctccccattcagtgaagccatgttgacagcttgaaatccaccatagtgcctgtgttgatacaacagaaattggtaagtactactaggcatgtgcccacctccacagacactcagtgtaccagcacatcactggaatgttttctgagacagtgatgtccctgttatgtcgtcatgtcttgtggggccaaaaggactccgaattcacctcctctctgttcttgcttttagaaaccataatctaaaataacctcacctgacactatttctattcaatctccaaattccctcactttgtgggtctgtgtctcctgtaagcatgtcagtccacaacttgacaactattttgaatgtagctaaaggatacagtgaaccagtttattattttcaaattatccttccttgcatggaatatgtagatgctgcagtcattgggaacagagatggggcaagcagcagctctgggccgtgaaccactttagagtcagacaattcttcagtggcacagacacacccttgggcatggactaatttgctttggaaactaagcagttccacaccagtcaccaatgaccttggatctatttccagctgagaggtcaaaaagatcacactacctaaatgtcctcctctccaatatatagtacagcccccatccatctcagtccctggaggtcatccagagctcccagagaatctctgctctggggcagaatcaccacgtctcctcctcgccagctccccacaggctccagcaaggctttcctgccaggtgcagggcatgggtgtggctctgctgtctctcaggtagagggaggccatacgatgatgtttgtataagaaggattgggtttcagaggttcctctcaaatacttgacataattttatttgctttttgtttcactctacaatgtcaccatttaggagagcaattattttggttgcattatttatggaactttgaaagatttttgtggttaaattaatttaagaaatcattcccattgtgcatcttttctgttcagatataatctgaggcagtgaaagaaacagcaatgattctgaaagcagtcacttacatgccctctgataaaggcattgttcaaggttcattactcacacctaactttcagtctactggaaatgaaaggcacagagttgggggcctgtgatcaagccacaagagaggactataccagctactctgggacttcagggcacgaagagatgacctcccctttagactctgctcaacgacgaaggaatgagttggtccatgggaacctgaggagcagaaattccgggagcctttaactgggacggagcaaggactgtagagcaagtcattggaaagggaaatggttcatctggtctgtcacagaagatagtggatagaaaggtcatataatccccagttccctggctgatttgcttccttatgatactattttgcagcagcgtaccgtcatctcacaccactcctctacctcttccagaatcatctcctccctctctgctgctcagatcagcacatgtgcattgcacaagctattcttttactgtagcagaccttttgctggtcttaattatatccatccttattttcccattagatactgctccctccatgattgcttattgccttgcaagggatcctttaccccgcgcccccagacagagtctcactctgtcgcccaggctggagtgcagtggcgcaatctcggctcactacaagctctgccttccgggttcacgccattctcctgcctcagcctcccgagtagcgagtagctgggactacaggcgcccgccaccacgcccggatgattttctgtattttttagtatagagacggggtttcaccgtgttagccaggatggtctctatctcctgacctcgtgatccgcccgccttggcctcccaaagtgctgggattgcaggcagaagccactacgcctgaccaagggatcctattttttatatcccagttttactttttattaacacatatctgaccccatcttgaaggtaatcacattatctgcctagacttttgctaatctttatttttatggtaccattgtcatttggggggacatatttgtttatctttggtaatggaaatgaaattacgttacacttcactttctgtgttttcttcctactttagggtaaatattatttccttctattcttcctattctattcctctctctttagatagttttaagggagaaaatgtcagtgagactgtaactgcagctatggggtaagaattatttagaatgagggtgggatattaagcttgataactcaaaggaacagtcagggttaaaactaatgttgggatcggggttcagagaagttgcttgtaaaacctgcaggatggcacttctggaatagtctcccggctccctctgcagacacttcccagcatcccttgggccatttcccttgcaaaagcaatgatgaaatttcacttattggccacaagatggcactgtggtccactgggctctaagagactctggggagagcctgggagagcagcctaggaaggaaagggttaagaaaaatcagggctggcatccaatatcatgcagatgttgcagcagttttcagttattgctagactacctacagttatacaacatacaggaaatacctctaatctttaatgagatccacagttgaagaagtttggcctggcagccttggtgtcaagggcaggtgcagacagaggagcaactatctcagaggaaaatgggaaagtgaggggtgggctgtggcttaagcccagtgcgtctctgctgcaccccgtcttccctgcagctcttaccaggcaacagcctccatgagagtaggtggatcctgcctgagcccagtcagaatgccccggactaggtgaactctgtaggcatggggagtaacacaacaggcccacctttcacacgttttttttttttttttttttttttttttttttttttttttttttttttttgagacggagtctcgctctgtcgcccaggctggagtgcagtggcgcgatctcggctcactgcaagctccgcctcccgggttcacgccattctcctgcctcagcctcccgagtagctgggactacaggcgcccgccaccacgcccggctaattttttgtatttttagtagagacggggtttcaccgtgttagccaggatggtctcgatctcctgacctcgtgatccgcccgcctcggcctcccaaagtgctgggattacaggcgtgagccaccgcgcccggcctcacacgtttccaaagtctgggctccaagcctttttttcccctttcctctgcagagtcctgccacttctgaagccttgtcctcactttctgcctgcctctcccacagcccccatggaggcagggatcagccagataccaagatatcacagacacacagggaaaaagatcatcctgaaatatgctcagattaggaaccattattcagtgttctgttatcaataagaccaagaataggggctgaggctgatccattattcaggtagtattggcagcatgaccaaaggcggtgccaaggaagggtacaatgtctctggaaacaagctcaagcattttccctcaaccctggagtctactagcaccagccagacctctgtacctctgtggcagtgcatccgcagccctgcacagccaactgctctctgcacaaaaaagggcagccacaggctggaggtgggcactccttcccaaggcctctatctcaaccaggagataaagatgccttttttgaagctcttctcagatgtcccagcaatgggctcccagtctgtgcatcctcctgcagcaggaacttcagtgtgagctgaggtccatcactgtgatgtggatgcacgaatgcaaacaacacttaatgttattttactcaattcagaatattctggcagttgcgtaaaataggaatagtagctcccaaaatgaaatttgtgtctcattttctttatgagagaaaagaaaaaaaaacagaaagcagctgggcagctttaacctgcttgagtgatctgggattctacaagtctacaagtggtacaaagaacatcaccttggcctggattccaatggataccaaacactacaaaaagtattgaaaacaatttataaaagacctaagtaaacaatctacttataggaaatgttagtagatccatcgcatagtgccattatacctgacgatgatcaactagtgaaattattatgtagagattatcagctaagcctctacttattacctctgagcatagagcagtgtttgagccttctgagggtatcttaaggaaggaacttaattcttaccattactttggcttggattaaaatccatgagcttgtcgtttttattgtaaaatattacagaataataatgatcaaacgttttattttcctctagcgtttattcctctttagaacgtgcaggttgaagctcacacacatgagcagggttccttaagatgagatccattaactccaggactgggaggtacacagctggccttcacaggaagtgcaaaccccaaatgcagtgacccctcctgtgtctacgctgtgcccaatacccctctgtgaggctgccataaaggcgggcaggctccttgcttggcaaaaaaatcagttcaccaattggccactttgctgaagaccagaataaaaggctaaattgtgagaatgatgaatgcccaattcccaaattgtgaaatgtgtaacagttcacgattcttggaataatttcaaccatgtgtggtttgttttttttttaagtttttctttgtcgacagctttctttcggccactgatcctcagttgtttcccagccgccttgtcagctgatctcattttgatgctaatttttttttttttttgctagctttgggattatttgttcttgttttactatgtcctctaagtgtggtggtaggttgctaatgtgagatctctctaacttgtttatgtgggtgtttcgttctgtaaacaatactcctaacactgctatagctgtgtcccagagattctagtatatttaatcttggttttcattagtgccaaagaatgtcttgttttctaccttcattttatggcttacccaagtcattcactagcagattgtttaatttccatgtaattgtatgattttgagagatcttataactcttgatttctattttttttgtgctgtggtccaagagtatggttgacatgatttcagttttttttataatttgtttacaattagtctgtgtccaatcatgtggttgatttcagagtatgtgccatgtgtagatgagaagaatgtgtattatgctgttattgggtggagtgttctgtagatgtctgttaggaccacttagtcaaatgttgagtttagtttatgaatatctttgttagttttctgccttgacaatctaatactgagtgttgaactcttccagtattgttgtgtggttttctacgtgtctgtaggtctctaagaacttgttttatgaatccagctgaaccagtgttgggtacctatatatttaggatagtgaggtcttcttgttgaattgggccctttatcattatgcaatgcccttctttgtcatttctgataattgttggtttaaagtttgtattgcctgaaattagaatagcaacttctgctcttttttgtttcccattggcttggtcatttttctccatcgctttatgttgagcctatgggagttgcatatgagatgggtctcccgaagacagcatacagttcagtgtttcacttgtctatacaactggacgctctttttttttttttttttttttttttttgagatggagtctcgctctgtcgcccaggctggagtgcagtggcgcgatcttggctcactgcaagctccgcctcctgggttcacgccattctccggcttcagcctcccgagtagctgggactacaagtgcccgccaccacgcccagctaattttttgtattttagtagagacggggtttcaccgtgttagcccggatggtcttgatctcctgacctggtgatccgcccgccttggcctcccacagtgctgggattacaggcgtgagccacggcgcccggcagctcttttaataataaacgacttttatgtgctgtgtttagcctgtttacattcaaggttaatattaatacgtgtagatatgatcctgccattgtgttcttgcttggttgttatgcagacttgattgtgtagttgctttataatgtcaatggtctatgtacttgagtgtgttttttggtggctgttagtgatctttcatttctatgtttaggactcccttcaggacctcttgtaaggcaggtctggtagtaacaaattccttgaacatttgcttgtctgaagggatcttatttctcctttccttatgaagcttagtttggctggatatgaaatatatagggatactggttggaatttcatgtctttaagaatgttgaatattggctcccaattgtttctgccttgtaaagtttctcctgaaaaacctgctgttagtctgatgggattccctttgtaggtgacctgccttttctttctagctgactttaatattttttctttcatgttgaccttggagaatctgatgactatgtgtcttgggggtggttgtcttttatggtatctcataagaattctccgtgtttcctgaatttgaatattaaactctctagcaaggttagggaattttttgtgctcaatatcctccaatatgttttcaatgttgcttactctctctccctctctttcagggacatcaatgagtcataggtttggtctttttacataatcccatatttctcagaggtttacttcattcatttttcttttttttccattctttttttgtctgactgaattgattcaaaaataagtgttcaagctctgagattattttctcattgattatgctgttaatacttctgattacattatgacattgttgaggttagtttttcagctctatcagatcaattttgttctttcataaaatagctatttcatttttcagctaatgtgtcattttattggattcatcagattccttagattgactttcagctttcttccgaatcttgatagtgtttgtttctaacctgtttctgaattctatgtctatcatttcagccgcttcagcctggttaagaatcattgttgggaagctagtgtgttcatttggtgctaagaaggcactctgactttttaagttgccagagttctttcactggttctttctcatctctgtggtctgaggtttctttaatcttttaagctgatgtcttttggaagggttttttgcttttatattctatgcccttgagggtttcactgttacataagctgggttcaggagactggcttcatttatggaatatttcagggggctaagattcagctcagtatgtctgggctgcgtgttgtaggcctgtggtgctggaattaagcccagagctttggtttttgaccccttaaggttaaagcacctgctacaccagaggggctgaggcgttcccaattccactggcaacaacactgcaatggggaatgccagccaaagtactttttccaaatggtggcattggggtacatgctcagaagcatgtgccaataatggcaatgtggcagtttccatacatatgtttgtgctagcttttttattattatatagtaaacttctttgcctctttttatagttattgtcttgaaatatattttatctgatatagatatagctactcctgatcttttctggttttcacgtgcatgaaacatctttttgttatctcttcactttcaatctatatgtctttttaggggaggtgtgtttcttgtaagtgacagatcattgggtcttatttttatattcattcagctactctatgtcctttgattggtgagtttagatcatttacattcaatgttattgttgataactaagtactggctcctgccatgtatttgttttctggttgttttgtggtcttctcttcatttgtttcttctttcctgtcttctttttagtaaaggtgattttccctgataacgtgttttcatttcttgtttgttatttttgtgtatctgttgtatgtgtttgtatttaaagttactacgttgcatatgtttgtatttaaaattactatgcatgaggcttgcaaataatatcttatactgatgacaacataacactgattgcctaagcaaacaaaccaaaaaaaaacagagaaaactagtaaaaatcttatattttaacattgtccacctacctttcaactttgtgtcatttctatttatatcttaggcactgtctatgtcttgaaaagctgtagtttttttttttaattggttcatcttttagtctttataagtagtttacacgccgtaatcacagtattataatattgtgtttttcttcgcactattatcagttagttttgcacctgcagataatttcttatttctcattaatgttcttttctttcacgctgaaaaattatcttttgcatttcttctaggacaggtctggtgttgaggaagtccctcatattttgtttgtctggggaagtcattatttccctttcatgtttgaagggtattttcactgagtacactattctagtattaacgtttttttttttttagcattttaaatatgtcatgctgctctctcatgacctgtaagatttgcactgaaaaagtctgctgctagactatattggtggtccatggtatgttatctgtttcttttgctgcttttagaatcctttctttatccttgaaattttgatttatccttgaagtttgattattgtcttgatgtagtcttctttgacttaaatatgcttggtattctataatcttcttttacttgaatattgatatctttctctaagtttgggaatttctctattatcatagctttgaataaactttcagccctatctctctctctacctcctctttaaggtcaataactcttaaagttgcccttttgaggctatattctagatcttgtatttgtgcttcattaatttttatccttttgtctcctctggtggtgtattttcaaatagcctgtcttcaagctcactgattcttctgcctcatcaattgtgaggttgaaaccctgatgcattcgtcagaatgtcaattgtattttcagctccaaaatttctgcttgattgtttttaattatttagctctcttccggattctgaatttcttggctgtgttgtcttgaattttgttgagtttcttcaaaacagatattttgagttctgtgtctgaaatgtcacacatctctctctctctctctgggattggcctctggtgctttatttggttcatttggtgaggtcatgttttcctgaatggtcttgagacttgtggatgtttgcctgtgtctgggcattgaagacttaagtatttattgtagtctttgcagtctgggcttgtttgtactcgcccttggaaagcttttcaggtatttgaatgtacttgggtgttgtaatctaagttttctatctctgaaaccttatctgcattagggagcaccccaagtccagtaattctgtggtccttgtggactcacagatatactgccttggtggtcttggataagatctgaaagaattctctggattatcaggcagagactcttgttctcttccttcactttcactcaaacaaacatctctgtctctctctctgctgaactacctggaactgaggagtagtggtacaagctccctgtggctgccatcactgagaccctaggtcagaaaaagccagcatgataatgggtctcacccaaggtccacagtaaccactgccttgcttgttgcctatgttcaaggccccagggatctacaatcagcatgtggaaaagtcagccagtcttatacccttcccttcagggtcacgaggccccctgaccccaggcacatccagagatgttatccaggagccagggcctggagtcagaaaccttggggatctaactggtgctctattctgctgcaactgagctggcattcaagtcacaagataaagttatttccactcttccctgccctttcacaaccagaggagtctctccctatggctaccaccgccccaggcccacagcaagaattgcctgactattgccaatgttcactcaaggcccaaggactctttagccagcttgtggtaaatgctgccaggcctgagactcttctttcagggcaatgggctctcctctggcccaggactggtccagaaatgcaatccaacagcaaagtcctggaatccgggaccccaggagcctactttgtgctctactccactgtggccaaggtggtagctaatctgcaagacaaaggctcctttattattccctctccttttatcaagcagaaggagcctctcctcatattcatcacagctgggaatgtgctgcatcacacctgaaaccagcatgtctcagattctcacctaagctctatggcaagtactacctgggcattgctgctgattattcagggcccaagtgctctttattcagcagatgatgaatctttctgggccttgttccttccccacaaggcagcaggttcccttctggcccatggtgtgtttagaaatgtcatccaggagctagggcctagaattggggcctcagtactctgctcattgccctatctgactatggctgagctggtgtctgattttcaagaaaaagtcctctttactcttccctctcctgtctttaagtggagagaaggtatattaggccattctagcattgctataaagaatacctgagactgggtaatttataagaaaagaggtttaattggctcatggttctgcaggctgtacaagaggcataacactggcatctgtttctgggaaggctccaaaagcttataagtatgcagaaggccaagggagagcaggcgcatcacatcgcaaaatcaggagcaagagatagagagtggagggtgtattagtctgttcttatcctgctaataaagacatacccaagacggggtaatttatttaaaaaaaaaaaaaaagaggtttaatagactcacagttccacatgtctggggaagccacgcaatcatgacagaaggtgaaggaagaccaaaggcatgtcttacatggcagcaggcaagagagctttcacaagggaactcccatttataaaatcatcagaactcctgagacttatttactatcatgagaacagtatggagaaaaccaccctcatgactcaattatctccacctggccctcgccttgatacatgatgattattacaattcaaggtgaaattgggtggggacacagagccaaaccatatctgagggggagctgccacacacttttaaatgacaagatcttgcaaaaactcactcactatcgtgaagacagcactaagccatgagggatctgcccccatgacccaaataccacccaccaggccccacctccatcactggggatgacaattcaacatgagacatgggtggggacaaatattcaatctctgtcattctgccttttttctctctcaaatctcacatccttctcacattgcaaaatacaatcatgcctttccaacagtctcccaaagtcttaactctttccagcattaactcaaaagtccaaagtctaatgcctcatttaagacaaagcacatctcttccaccttactagcctgtaaaattaaaaatatatatatttactcttaagatacaacaagagtataggcatggggtaaacattcttcttccaaaagggagaaattgggcaaaagaaaggtgctacaggcgccatgcaactttgaagcccatcaggagagtcattaaatctttttgtttgtttgtttgtttgtttgtttgtttttgagacagagtcttgctctgtcacccagactggagtgcagtggtgcgatctcagctcactgaaacctctgcctcctgggttcaagtgattctcctgcctcagcctcctgaatagctgggattacaggcacgtgccatcatgcctggttaatttccatagttttagtagagatgggatttcgccatgttggccaggctgttctcgaactcctgacctcaggtgatcttcctgtcttggccgcccaaagtgctgaaatgataggcatgagccactgcacccagccaaagtcattaaatcttaaatctccaatagttcttgactccatgttccacattcagggcacacactggtgcaaagggggactaccaaggtcttgggagttcttcgtctgtggctttccagagttcagcccccagggttgctttcacatgttgttgggtgttttggcttgtccaggcacagggtgcaagctgtcagtgacaatatcgatctggggtctggagggcagttgtcccctttccaaaactccactaggcaatgccccagtgggattctgtatggggcctccaacctctaatttcctctctgcatttccctaatagagattctctgtaaggtttccacccttgcagcaggcttctgcctgatcaccaaagattttccataattctctgaaatctagatgaaggctgccaagctttcttgattcttgcattatgtacacctgtaggcttaacaccacatggaagccaccaaggctatagcttgcattctccaaagtggcaactcaagctgtatctgggcccctttgagccacagctggagctggagcagctgggatgcaggccgatgtgttctgaggctgggcagagcagcaggaccctgggcctggcacacaaaactattcactcctcctaggcttcagggctggtgatgggaggtactgcctggaagatttctgaattgtcttcaggcaattttcccaaagtctttgctattagcacttggctcttttttaactatgttaatatctctaacaagtggtagctccacagcctgcttgaattcttctcccacaacattttctttatttgccacatggttaggctgcaaattttccaaacttttacactctgcttcctgtttaaatatacattccagctttcagtgttttctttgctctcacatctgagtgtaggctgttagaagcagccaggccacatcttcaacactttgctgcttataaatttcttccaccagatacactaggtcatcactcgcaagttcaaacttccacagattcctagggcagaggcaaaatgcacccaagttctttgctaaggcataacatgtgtgacctttgccccagttcccaataagtttctcatttccatctaagacctcaacagcctggacttcactttccatatcactatcagcattttggtcacaaccatttaaccagtctctcagaaattccaaactttccatcatattcctgtcttcttctgagccctctaaactcttccaacttttgcccattacccagttccaaagctgcttacacattttcagttatttttataacaatacccaacttcttgtatcaattttctgaattaggccattcttgcattgctgtaaagaaatacctgagactaggtcatttacaagaaaaatggtttaataggctcatggtttttcaggccgtacagaaggcataacaccagcatctgcttctggtgtagtctcaaaagcttacaatcatggaagaaagaaaaggggaggcaggcacattacatggtgaaaacaggaacaagagagagaaagagagtgtgtgggggagggagggaaggtcatttaaaacatacttttaaatgaccagatctcacaataattcattctctattctgaggacagcatcaagccataagggatctgcccccgtgatacaaacacccctcaccagcatggggattacaattcaacatgagatttgggtggggacaaatatccaaactatatccgaaggagtctcacctggagctgtgggctgtgctgcctgaggttggggatggggtggcataagcaatttcttggccaccccagctggtatctcactaggtcatgtgtccccaagtccactgactctgagttcagcacagcaccaagacttgcccaggaattgtagtccttgtggcctggactgtgtttcaagtttatttaggaccctaaggcactttagcccatggtagcgaggctagccagaactcaggttctgactgctgggataagtgattcccctctgactagggctggtctaaatgttcttccatgagtgctggctgagtcctgcctgctgttgctatccactgtgtgaggacagcaacgacttccaacacaaagtcccacagtcactgcactctccctaacccaaatgcacagactgtctctccaagccatatggccactgccaggggatgggggaggcatggtattggcaattcaagagtgtcttttctacctctttagtgcctctttcagtgatatgaagttaaaaccaggtactgtggtcacttagttgatttttggttcttatgaaggtgctattttgtgtggatagttgttcagtttgatgttcttgtttggaggaacagttaacgaaggcttctatttggccatcatgttctaccttcttcttaatcattctattgggtctgtagtgatatctctatgcatttttctataagtaattatatttacatttttttctgttttcattagtaatttctatctccttttttcaagtgtctgcttttaaatttgcctgttttaaaatcttacgttgtttgttcttatattactaatacgtataatatgtttgtattttttatataaaccttttgaccattaaatatattgagttagtcttctcccagagtggcctgcctttgtactttctgaatagtgtcttctcatgaactgaaattttctattttttgaagtttaattcatatatatttttccttttacagtgactactctttgcatttcaaggatatcttgcctataacagaattatgagttgttccattctgttacttactctactcctcctcattagtagccccatccctttttctttgtcatcacttgaaaatgctaaatctccaaaatcacaaattaaatattccactatctgcctacagcttcttatcctatcatacctgttctttgatattattgacatctcctctccactggtaaatattctttctatttcctagggtccctacagaatttctttactcattctagagcagatatgaggatgctacgtgttaaaaatcctagcttgcaaatagttattattttatattgatactcttaggcttccctttcatttacaaaaataaacaagaataaatgcactgatctctttggcatggcagaagctgaatgctgtcagagtaagtcacaccggcacaaactgttatcatgataaatacatagtcactaagcttacctgcctttatatccctgctttgagattatagtatggtccttttactagctcagtctttcaccctcctcaaatattgtttcaaatatttaagacttttttccagtccctaattcttctcttcttgcctcttaagccaaaggcacatcttgttaggacatgctggaccttgcatctctgcaattaacacagtttttctactgtgtgaaggtgtcaccttgagtgaagatggttcttgcggacgggaacccagtgtggggctcaactctaaagggatgtggcaatgggtctgaaaatgggttctcaatgaagcatcacagtgtccactatgtttatgaagtagatccaccctgccacagacttctaggtaagagtaggtgatcatgcatcatgattctctactagaacctctttagattccatgtactcaagtcatactatttattttcatactgcatattttaatgcttctcccaactcttttggtaatgctaattgcatgtgatagaattttcgttactgctatttgcaaagagtgagaaattgtattatttctaattgcagaatgttagaacttgtattattttgttaaagcaaaataagatctccaagactcacttttccattgctatgtctattaaccatggtcctggaggtattgaggagggatgaaaagacaatttacaaaactgtggcaaggttaaggaacccagtaagagaagagaaaggattatggggatagtatagtgagtgctcttattcacattggcctaaaagaagtaggagagtgtgtggatctcggggcttttgacattttacatttggggtaaggatgtttgtagggtgctgtgacctttggtagagaaaagcaatcaatatgaaatagtccagcaaggaggcagccaggagacacacaaaccgggacagttggttaccctctctctctctctctcctgccattgtctctcataagacaaactcactctggagtacacaaaaagagatgcagttactataatccattggcatcaacctctgaaggcaggatggatctggagggataaacataacctgcccagaggatgactcatagggtggccttgtgggtgctgaatcccaagtggttaggtctgtgctgtgagctgataaagccccagaattatttatggggaatctatactcctaataatttacagacaacacagatccactttggacttgatcagatggacaaaatcttggggacttgacatcactgcgcacacaggggaggagctgggattgttgtccaggaaaggaaaatataaggagaaaccttggtttgaatttggtgtcagacatatgatgagaggacagccaggaagatctggaacatgaagatttaattacaggccactaactctcagctgacgggcaggtctgtgagttccagaatggagcactgcagcagtaggtggggaggaggctgagagggcgatgaggcagtctgagtgctgagggcagtgcagtcagagaagcaactgcctcatcacagaagcttctgcccttactcagcccccttgctctgcaggatgaggagggagttccatgggtagggaccactggacctaaggaagcctgaaggggaaggaccacaggacagtgacatcacaggatatccttcctatcaggaaaagtgaggctcagaactcagctcttcctgggaggaccaagccctgagcacaggtgcagtgctgcctgctccgctgtgccatgggctccggactcctctgctggacgctgctttgtttcctgggagcaggtgaatcctgtggacaggacagcacccctattctcagcttgcccacccctgtgtcccccacttcaccatggggaggcacaagttcattctccacctattttttcctcaggcccagtggaggctggaatcacccaagctccaagacacctgatcaaaacaagagaccagcaagtgacactgagatgctcccctgcctctgggcataactgtgtgtcctggtacctacgaactccaagtcagcccctctagttattgttacaatattgtaataggttacaaagagcaaaaggaaacttgcctaattgattctcagctcaccacgtccataactattactgagtcaaacacggagctaggggactcagccctgtatctctgtgccagcaacttgatgcaggcctgcagagccaagaacattctgtgtacaaacatccctgccccagtgtggagaacttcagccctaacatatctgtgagaacttgaggactgtagtgggaaagaaaagcagtttcaggaagctggatcctaaaacctggggttttctgccagttaggagtggggataacaaagccaagagggtctgctcaggaggtggtgaaaactaccttcttcgccaaacgctgtacactatagggatagtggaagtgtttgtaatttaatagctggtgccctctttacagggcagcagatttaatttcagggtcaagattcttgataatagtgtggaagggaaaatcatagggtttgctttatataattcagggagaagaaagtgagatttggggaaattctatgaaagagaaaatgatcaaagatagttgaaaacagagatagagcagaaggtaatgaaacatggtgatctgtgcaccatgagctcccttctcctcccacagtttttgatatccagaaaatacaaagaaaggtcttatagcaactgacatcacctggggactggtcctagttggggatatcacaaatagcagcctgcctgatgtgagggccttggggttggttctgacatcttctttctcgacttctggatctagtcttgcctgctcgaggcacagtcaaatacttcccaaaacacaaaggaggtcaggtcagtcttggtcctaaaggtgcaaatgctgtccgttttctcccaagataaaattctgcatccctgggattcctctctgagactcagtgcccagattcaattaccttctgtaattaaacagttctttgaacattttctaaaactcatcagccttggtatcatctgcatttctgctatttccttggcctggaaacttttgttctctccagacacatccagcccctgctcatctgtcaaggatggtctcacatctgccttactctttgcttcttaccctgacattccctggaactggactgtatcaatttatttatttacttttttaagacaagagtctcactctgttgcctgggctggagtgcagtggcatgatcttggctcactgcaacctccatccccccggttcaagctattctcatgcctcagccttgagagtagctggaattacaggcacatgccatcatgcatggctaatttgttttgtattattagtagagacacggtttcaccatgatggccaagctagtctcaagctcctgacctcaagtgatccccacgcctcagcctcccaagtgctgggattacaggcatgagtcactgcgcccagccctggactgtatcactttcttttctttattttcataagaaaagccaagtttataattaatagtatctgaagtttgtaaaatgaaaaagttaatgcatacttatatagaatcctggaatatcattaatcaccatcttcccttcaatgggactcctctttcttaaaatgtaatgaagattcttagagacagtgtcagtttttcatataatttctgcaatattctaagcaattgtgtcttcatagtcagaattgataaccaatgctataaagtatcctaactctaaggctggaatttgcaaatactcttttggagcaaataaaattgtgttgtagtaatattcatccagtctcatgatcctgaaaaaacaaattattcagcataaccacactttccacagccacatttttagagatttgatgagactggaacatcatcaaagatgcttctcagaaatcaacctaaaaaactgaaataaaaattagttaagctcagtaatggaatcttatcatcctttctgagtaaaagatattgtgtgtgcaggaacagaaaaccaaacaccacatgttctcattcataagtgggagttgaacaatgagaacacatggacatagggaggggaacatcacacaccggggcctgtcggggggttgggggaaggggagggagagcattaggacaaatccctaatgcacgcggggcttaaagcctagatgacaggttgatgggtacagcaaaccaccgaggcacatgtatacttatgtaacaaacctgcacgttctgcacatgtatcccagaacttaaagtaaaataaaaaaaaaaaaacccaagatattgtgtgtgtgtgtgtgtgtgtgtgtgtgtgtttgtgtgtgtgtttgtgtgtgttttctgtggagactcagccgcatggaaatagtttctcagggtggcattactaagaggtgttgggtcattggcagagctcctaggtacttctgggtaaagaaaggaaatatcagacccaattgaatctgcctaagttatatacagctcatagggtcgtttatttcaagattttttaaaattcagaaataaatttgtaaaattgaaaaatcctctttatagaatgtgctatctaaaatctgggaataataaatctaaatataggccagacgcggtggtttacacctgtaatcccagcactttgggaggccgaggcgggtggatcacgagatcgagagatcgagaccatcctggccaacatggtgaaactccgtctctactaaaaatacaaaaattagctgggcatggtgacaggcacctgtagtcccagctgctcaggaggctgaggcaggagaatggcttgaacccaggaggtggaggttgcagtgagctgagattgcgccactgcactccagcctgggtgacagagcaaaacagcgtctcaaaaaaaaaaaaaaaaaaaaaaaaaaaagtctaaatacaaagtgtgaaaaggtgtggctctgattattcaaagggagctctggaatgtcgtgtttccagtctggatctgcttgatatcctcacactgtttcaccctgtggcctgtataattctggctcctctcttccatcttaggatactcattgcaatgatgtagcagcagtttattgtgcaatcaagatgtgcccttttgttttcactggccaagggtgaatttgaagttccaccctaagtcaacccttctgggaaagcaatagagagtgtgtgtgtgagagggtgtgggttgcaggggttggtgtaggggcatctctgctcctgacttagacaatgctgagctcatcaggtcagaaggtgtgaatccatgagactggaactttggccacttggaggtgctgtggctccacaaagctgtggggaaccctggggaggggtggagggtgacccaggagaggacggctgaagggaatgcttggctgcgtgctggcatcaggaggcggttggaattcagagtaggtcctgggactgcccagggcaaggtaggcacaccagggacctcagtttgcatcaaggagagaatgtctttgcctctgcatgggcagtggagggtgaagaggctggggcagcaagggctgggagtcagtgccaggaaagtgacaggggttgtcagagaaaaataaggtgggatatgggcatgtggagactgtgttccacctgccccacttttaatttcagggttgtgtaggacaggaatggtgcaggaagcagcagagcctggggtctgacaatgggtagagcaggcaggggtggcctgcagggagagttactgggaaaggccggtttcccaaggaaatgcctgaaacattcctgccccactcaggaaatgaccatgaggtgggtgctgccagacagaggggttcaggccctgcagagctgacaggcctttcccaggcactccctgctgcttctacatgtgatctgctttaatgcccactgatatcaggcagggtaaatatgattttacctgtttatacatatgggggaagcagctgtccctgttctcatgtttagtaactggctatagtcagttcctccaacacctctgcacgccgccctgctctgtacatgtgtcctctcctctggcttcctcatttcagatccccgttagcaggagggaaagatcatgtctcatatgtggtcattaaaacctcttccccgacaagcccaaggaacttccaggtcaagcatctacattcatccttcactgtaggaaagaaaaagaaataaaattttctgcactgtggactttctgtaactgatgtaatataccttgaggaaaatgagcataaatagttgctattcattaattaattaatcttattcttttactcaataaactttttgaggatccttctttgtataaggtattctgtgacataaaattgaaaagaaaaaatattaagtggaaaaaatgtttcttgctttttacagtgttaaggtttgcatttattttttaaattgttttctttattaaaaatagtttactgatttctaaattatacaaatttacttttttctctttttttggctaactagtcccattttagacagccatttaatttaactgtggtaggaatatgtaatatgaaatatatctttttaacagatttttgtatgtacaatacggtattgtaatctacgggcaaaaggttgtacggcaatctctagatcttattcatcctccttaactgaaattgtataccattgacagcaactctccatttactccaatccccagcccttggaaattaccttcacctttgcttccgatacttcgattatttacgttccatcatataagcagaatcatgtggtatttgcctttctgtgcctggcttattcacttagtgtaatgtcctgtgggtttatccacattgtcatatatggctggattttcctctttttaaatgtttaaaatacttctttgtatgcatctaacatgtttaagttctgaagtataaaatgtgtcatatctgactgtttctatgaaacagtctgtcacatgactggcagtcatttgcagaactgcaagcactgagtacactgatgcacattcacagttcaattctgcttcatggagaagacttagagaaaatattaatctaatcattcattatcattttatgatgcacaaaatagaaagccttcattaggaaaatttcaattaattagaaattcaactatacgaaaacatcttaacgtgtaaacgctattctcattttacaggtagaggaattggcccatagtttaaattacttgaccaaattaagtaggaattaggatgcagtactggggttctaaccctggtctatcaaagccctgttttttatagctatatactataatctatttcataacaaatgatgcttatcttcacaaaaattcaaatgttatctcctaggtccctttcagacctgctggctctaataacatcatagacagaaatcagtttaccctggagaggggggggtgggaaacaactatgaatgggtgccatgacatcaagcctgactcccattctagcaccagctcctcaagacgtgaggccagttcttgacagatttggcttagtttgttttctgtttttttgtttttgtttttgttgttgtttttgtttgtttgttttaatctatgaaatgagactgctactgtccatccgcaggctgtgtacaaaattaaatagcataaagtatctagcatgtagcagaaatctagatattaggttggtgcaaaactaattgaggtttttgccgttacttttagttacttttaatggtaagaactgcaatacttttgtaccaacataatattttaatttcctttgataatctcagatagcctctttcaccatgccaatgtgcaaaggcagatgcggacatatgatacctagaaatcttaggttgaggattcagaagtcacagaaatggaaatgtacatttcctctgatgatttatttgatgaaattaactaattaactaaagaatgcagtatggatccctcttgaggtatttaaaaaatcaatgttgttgacatataaattatacaatgtaaacattatacatcttaaatgaacagatcagtgatttttgagcaatatatatgtatatgcccttataatccccacccctcttaaaatgtaaaatatccccacccctattaaaatgtagactatctccagaaagttccctcgaacacctctgcaatgcctatcttggtcccagaaaaccaatgatgtaacttctatcactggagagtagttttgttcacaaatatttttaatgtcaatttaaaacccatactgattaatcctcttgaatacatagctaaataatcaaggcaaggaagagtttctgggaggttttatggttttagaagggattgaaaccatgagagctaccttgatccatggtaggaacgattctatctggagatggatgttgtgccgaaataacctcaaaaggtcttttcagctggtagaagctgattcgacaacatttatttattcattttcattcatttctttgcttctccattcattaactcaaattgtttagtaatgatatcctgataacagttaattatctccaaggaaattattttgagttcccataggacacacatgcagctggttttgtgttcacacactgagaacgctggcgtcaagcaaaccatggtaacagagacttcattgaaagatgatgttacattgggagaagcattctttttgccttaaccccaagtgtttaactcataaatcctgagccttcagctagaattcatcttcctgttctggccctgtcctgggcaccaggatcctgagctgtgtgttcctgtctcttgaaccacaggagtcctgggcacgcacatgaaacccactaatgggcttgttggatcccagctgtgactttcagcaccaggtggcccttagctgtgactttaatttctgtgtccttcactgctaagtgaagccccatagacgctgaatgaccagatcttggtgatgcattgtgctgaaaggaaaccagcacagggggaggtgagcagaatatgaaacaaaatcatgtatttacaaccagcgacatgacttactggcagatcctttgttcaaacactattaagaatttaaaaatcatgacagcagagtgataaagcaagcgtgggatccttctgaatgcagggctctgtacaccgaagatacagtttttgagctccttttcatttattactaaattaatggcaggaatcctgaacgaagggatattccctatgagacatgacacctcaaataaaacgagagcatttttccttatcttgaagtctgctccctctcgccaagtccctcactcatcaggacacctttgtgctcacaagtcttcagcagcgctgggtggccaccattgtccacacagagagggcagtcagcagcatgaggtggttctgcctgctgtggtctcaccccaggaacagaaagcaagactcctggatggagctgaaggtgctcagctggacttgtcaggagtcccatctgtcagtgaattgacaagaaacagagcaaaactactcctgcaatgttgatgagcctgcccctgggatttggaaacctgataacagagaaaaccaatatagacacaggactttaacaggattatggtcaattaagcagattggaaaaggatacttgaaggagtgtttgggacacaggaatcaaaaacaccagggagacaagaggatttttcctaagattctagactacagcaatacatagataactaacaccagaatattaatgaggaattatatcattgcaggaataaaatttatattgaattacaaactgtttgcacaaaagtcaagaaaaacttgaaagccttatatcaagaagcattcttcccatccaaacttcagtggtgcatttattttggatttgaccctctggggaaggggcatggcctctctcgacaagaaggttctggggaccaggcagagagaatgaggtctcaggatgacttccttgacagccctgttcgcctttcatcaacacacagacccagaagacctctctgtcttgtagcatctgccatgagaatcaggctcctgtgctgtgtggccttttctctcctgtgggcaggtaagtcctgggcagggcccatgtgtagatttcaagacccagagccttcccattgaggctgcagcattggctttgttctccttctctgtaggtccagtgattgctgggatcacccaggcaccaacatctcagatcctggcagcaggacggcgcatgacactgagatgtacccaggatatgagacataatgccatgtactggtatagacaagatctaggactggggctaaggctcatccattattcaaatactgcaggtaccactggcaaaggagaagtccctgatggttatagtgtctccagagcaaacacagatgatttccccctcacgttggcgtctgctgtaccctctcagacatctgtgtacttctgtgccagcagtgactccacagtgctgcacagccatctcctctctgtacataaatgcaggggaggctctgccctcctccccgaccccagactcaaccatgtccttggcagagttctcagcactgggaatcttggaagcccaatgggtgccgggcagtgtgagcctcagtctgtgccaggtgcctctgcaggcagtcccagccaggcctggactggtcccagagcctcagaggtctcttttgttgctctctggtctttcttccaagctatctttttgggatgggaccagggctttcccagctcttacttttctactcatcatcctgagtctgaggtccacaggatggaacaggatttgtatttcaaatctgtctagactcctgtttctctctgggggccacgttgcttcctctctccagggtttcctccagtacccactctcatgtggtctcacctgtggcccgcctttcccatctgagcagtcacccccgaaggccttgctgggcctctgcacaccacctcccctcgcctttctactgcagccatgaggctgcctcttctgtgcctccttcctttccaacacagagacctcaaaggccatttcctccgccctgggctagtgccttcctttctgcagtggtcagcttctacctgcacttctgatctcagcatgatcagcctctcctgctggaagcactccctcaactctcagctgaggtcaaatttcagtttccctctcataagctcacagaatcatgtgcctcttagtaaagttcagcaccgttgcaatttttccaacacttgttttattccttttgtgctccacttaattttaaactcatgaagctgaaggctgagcttgttacattcaccaccagcagtgcctggcaggcagggagtcctcattcatttcacagagaatggatgagtgagtgacaggtgagtgagtgatgagtgggtgaatgaaccagtaacaggaacacactagattcattgtaccctggcagaggtctagagttaactttgcctgagatgctctgttatgagctcatcaaggagcactcacttgttgaacaagcataggaccatgcatggtgcaagccagtttgtcagtctgggaatttccaatttaaaatatgatgtgttcttcaagctgaatgagggtaaactttctgtatataattataatatctaagccatttcttaaagttttgggttaggaacaaaaaacccctgaagagggaacatttgtagatttaggatttttaaaatatatttatattattttcccttggaagaacaggatgggaacagccttatagttgctaatttgtggagaaggcatcatataaaagtaagagaaaatcagaattgtgttctagagggtaaattgtggctgtcctgagagcatgttccccaggaacctaaaccgtgagcatgttcaggaacccagagtgcaacagacaattcttggccccatgaatttggtggtaagactggagacagttggaaaaaccatggagtcttgaagttcttcactctcaatgcaggcctctcttgaacaccacagactaatgtcagataaatatgcttccactattaagactattaaaacaagaaccaatgaagagaagtgagcagaaacaataagcaattgaagtgtttgaagacaagaaatttttaccattaaaaggtatgaaagtttgtagaactatgtttaaaggaaattgaaatgtgaacaagaaaaaaagactgacagaaaccatcaagataacattaaaaaataatcaaattcaatacagaaatgattaagattatcactgaaaacaaaatggaaatgaagaaagatgaaatgcttctaagagattattagtgatgtcaaggacagagctgaagaagttacatagaatgcagcaccgaaaattaaatatgtaactttagaaagagcttaagggtggtttccagcatagtagaatatataatttttaattatatatatttatttatataaagttatttatatttatatatttaattatatatttattatataaaaatatataatataataatatagaatatagaatatatattctataatatagaatatagaatatatattatataatatagaatatagaatatatattatataatatagaatatagaatatattatatagaatatataaatatatatatttcccatttttcttatagataattgaagtttcagaaaaagaaagtagagggaataagtgattgtgatgagacattagctgagaattttccagaggtgtttcaggacctaaattctcaatttcaagaattcaaatgaatatgaaataagataaatgtttatattataatgagattgtggaacataagtgacaaatagatgattctaaaagctgtcaaaaagaaaagataaatctctcctagtggaatagactgaaaaaatcaatgaaagaaagaggatcagaaataaccatttagtcggaattataatccccattcattaaacactgagatggaggaaaatatatttacaagtggaaaaattaaaaaaaaagactatgagttttccaataaggtatcttttctgaattatagtcaacaaaggtgggaagtggtcccagaagaaaggcatgaggtgcagcttgtgagggaacccatgtgttgggacagccccgttgggcacgtgtgactgggggatggaggaggctggggcatcaatggggatggcataggggaccctgacttgcagaaaagacaatgagctcatcccttggtgccttgtgttgggggcgctgttggcacatcctagagaacatgcccagcagacagaggagcgcctgtgtggtgaggagataaactcagaaatgcagcatgaggcctgtagctccagacagctctagagcacaaagtgaagaccgatgcattgatgttgtttaaaaggagctaataaatatctaaagcagtcatccaagtgtgttctaatataaatcctgtgttcctgaggttgtggggattgagagaggaagtgatgtcactgtgggtactgttctgtgtcaggacaaggacgtccctcctcctctgctcctgctcacagtgaccctgatctggtaaagctcccatcctgccctgactctgtcatgggcaccaggctcctctgctgggcagccctgtgcctcctgggggcaggtgagtcctcagacaccaaccagtctcattctgtgtgtctgtatgtgtgtgtgtgtgtgtgatgagtacaactgttttcctcatcctgttctcaacttgtgtctccgcagatcacacaggtgctggagtctcccagacccccagtaacaaggtcacagagaagggaaaatatgtagagctcaggtgtgatccaatttcaggtcatactgccctttactggtaccgacaaagcctggggcagggcccagagtttctaatttacttccaaggcacgggtgcggcagatgactcagggctgcccaacgatcggttctttgcagtcaggcctgagggatccgtctctactctgaagatccagcgcacagagcggggggactcagccgtgtatctctgtgccagcagcttaaccacagcatgacacaatcgcctccttcctgctcataaacctcctcctctctctccttgcttccttatgatactattttgcaccaggggatcctcatctcacaccactccactgcctcttccagaatcattgcttgcatgtccgctgctcagatcagcagatgtgcgttgtatatgttaatcattttctgtggaaggctcgttgctggtcttcattatccatccttattttccacattggatactgctcccttcaagattacttgttgcctacaagggatcctactttttacattcaaattttactttttattaatacgtatttgatgccatcttgaaggcaatctcattatcatcctaatcttttgctaatctttatgtttacggtaacattgattgttattttgggggacatgtatttcatctttggtaatgaaatgaaataactatgcacttcaattcctgtatgttctgcctacttaagagtaaatccaattttcttccattcctcccattctatcccactccctttatatgatagttttaagggagaaaatattaattagactctaactgcagctatgtgataagagttatttagaatgagggtgggatattaagctttgagtaaagcaatagtcagggttagaactagtgttggaatcagggtttagggaagttgctcataaaacctgcaggatgacacttctagaatagtctctcactcactctgcagacacttcccagcatcccttgggccattgcaaaagcaatgatgaaacttcacgtgttggccacaagatggcactgtggtccactgggatctaagggactctggggagagcctgggagagcagcctaggaagggaagggttaagaaaaattagggctggcatccaatattatgcagatgttgcagcagttttcagtcattgctaggctacctacagctatgcaagatgcaggaaatacctctaatctttaatgagatccacagttgaagaattttggcctggcagccttggtgtcaagcgcaggtgcaagcagaggagcaactgcctcaaaggaacgtgggaaagctaggggcgggctgtgccctaagctcagtatgtctctgctgcaccccatcttccctgcagacctcgccgggcaacagccttcatgagaggaggtggatcctgcctgagaccagtcagaaggccctggaccagctggactccgtaggcatggggggtgacaccacaggcccaccagactattccctagggagcagcctccaagccccagctcacagtcctgaggatcactgcacttagttgggccagcccctcctcactctgaccctaccatgaaccccaaactcttctgtgtgaccctttgtctcctgggagcagataagttctggaaacagctgcaaaaccctgtaatgggtttgcaatgtctgggctacaagccttttttgtcctttcctctgcagagtccccttatttcttaagtcttgtcttcactttctgtctgcctctccagcaggctctattgatgctgggatcacccagatgccaagatatcacattgtacagaagaaagagatgatcctggaatgtgctcaggttaggaacagtgttctgatatcgacaggacccaagacgggggctgaagcttatccactattcaggcagtggtcacagcaggaccaaagttgatgtcacagaggggtactgtgtttcttgaaacaagcttgagcatttccccaatcctggcatccaccagcaccagccagacctatctgtaccactgtggcagcacatccgcagccctgcacagccagctgccctctgcacaaaaagggcagtcacaggctggaggtgggcactccttatggaagcccgtgtctcaaccagaagaaaaagctgccctttctgaagctcttcccagacttcccagcaatgagatctcattctatgtgtgctcctgcagcataaaacttagagtgagctgggtctgtcactgtagtgcggatgtgtaaatgcaaacaacgtaatgttattttgctcaatttggaatattctggtaattgtgcaaaggaatggtagcttctaacaagaaattcatatttcactttcttttcaggagagaagaaaaaagcagaaagcagctgggaagctttagcctgcttgagtgatctgggattctcaagtagcatacataacatcaccttggctttggttcctttagataccaagcatgtgttctgtggaggacaagaaaatccatttttttttgttataaagttataaacacacaagagaacaatccagttagggagaatgttaataaatacaacaaactctgccattagacctgaagataatcagctagtagaattatcaaagagattgtaagactcttactgagtacctgtttgaggtcctctgaggatagatgaaggaaggaacttaattcttaccatcactgtggcttggattagaatccatgagttccttaacttgtttttcttgtaaaatattataaaataatatagaacacacattttattttcctgtagcctgtagtcctctttagcacctaaagggagaagcgcatatcccggtgcaaaagggagctggttgcttgcttggcaaaaaaatgaattcaccaattggccaatctgctgaaagtcaaaatgaaaggctaatatatgagactgatgacagttcatggttcttggtataacttcaacagcgagtgaacatttttttctttgtctatagctttctttcagccatcgatcctcagttgtgtcttagcctcttatcagtccagctcactttgatactaaatttgattgttgtgtatctcagcaagaagcacgtctcacattctctgtattttatgtggtcatgagtgtgttcctgtcttattcttattttatgtggtgcatttttaaataggactgtacagaatacaagcatctatttgtatatgactctcatcttttatggggagaggtcagagtaggtgagcgtgcactttgattctctgctggaatctctttggattctatgtcccctgtcacatggtttattttcatatgcatatttctcatggttctcctgactcttttagcaatgctcattgcaggatattagaaattgtattacttctaatggcagaatgttagaaattgtgttgactcttaaggcaaaataaaatacccggactcacctttccattgctgtgtctattagtcgtggtcctggagatatcaaggagggacaaaaggagtatttgcaaaggtgtggcagggttaagggaacccagtaagagaagtagaagtagcctaagaacagcagaatctgtggctcttattcacattggcctgaaataagtaggagaggatgtggatcccaaagcatcaggtactgtagctctaaggcaaggctgcctataaggtgctgtggactttggtagggaaaagtaacctatataaaataatgaagcaagaggagagccagggcatagatgaatcagaacaagtggtgcccctacctccctctactctcctgccattgtctcccattagccaaactcactctggagttagagaagaagagagccagttaacataatacactgaggtcagcctctgaaggcagggtggatctggagaaattaacgtaaattatccagatcactacgcataagatggccttgagggtgctgaatcccaaactgtctggctaggtctgtgctgtgagctgataaagccctagtgttatttctggggaatctgtactcttaataatttacagacaaccaaggtctgctttggatctgatcagatagactaaatcttggggactttgcaccactggccactcaagggaggggctggaaatattttctgaggacaaaaaaatagaattagaaaatttggttgaatctagcgtcagagagatgacattaggacagccagggagagctggaacaagaaggtttaatcacaggctcctcaccctctgctgatgggcaggtgtgtgagctccagcatggagcacgacagcactaggtgggaggagggtgagagggtgatggggcagcctgggagctggagcagtgtaggcagaggagcaactgtctcatcacagaagcttctgccctcacccaacccttctgctggacagggagggagttcaggttgtggggagtactggacctcaggaagcatttatagggaggacacaggacagtgacatcacaggatatcccacccatcaggaaaatcaaggcccagaactcacttggcccttccccaggaggaccaagccctgaatcagatgcagtgctgcctgccccactgtgccatgggccccgggctcctctgctgggaactgctttatctcctgggagcagatgagtcctgtgcacagaacagcagccccattctcagatttcccacccctgtgtcctccactttacactggggaggacctccaggctgtctgctgtgctcatcctccatctgcttttcccacaggcccagtggaggctggagtcacccaaagtcccacacacctgatcaaaacgagaggacagcaagtgactctgagatgctctcctatctctgggcacagcagtgtgtcctggtaccaacaggccccgggtcaggggccccagtttatctttgaatatgctaatgagttaaggagatcagaaggaaacttccctaatcgattctcagggcgccagttccatgactgttgctctgagatgaatgtgagtgccttggagctgggggactcggccctgtatctctgtgccagaagcttggcacagccctgcagagtcactggaactctgtgcactaatctctctgcttccgtgtacagcagtctcagaccagacagctgtgagaacctggggccttcagggggaaagataaacaatttcaggactctgaacaaggctggcggaaacaaggccaggaggatatgctcagaggatggtgctgcttcaggaggttcacggcaaaattactttctttgtcggatgctgtacactatagtgatagagtagctggcactctcctttttagaaaaagaaattcattttggtgtcaggattgttcgacagatgtgtagtatagaaggtaaaatctcaagggtttgctttatataattaagggagaagaaattgagatttggtttggagaaacttgaggagagagaacatgattaaagattattaaataaatagaagtagagctaccagatgataaaaaattgtgttctctgcaacataacctgtcaaagttttcaattgctagaaaatacgcagcaaggccttgtagcaactggcatcaccccgaggccactctatgatggtcatcaccacgtagccagttgccctgtgggagggccctggagctggttccaatgtcttccttctggacttatatctcaattctcaaaacagaggaattcatttcactgctgatggtaaacagataaaggctctcccatttccccaaagatacattctgcttcccttgtatctctttctgacacttaccgcccagatccattaccttctgtgatcaaacacctcttcgaatatttcctaaaactctgcagcctttacattctctgcatttgtgctcagtatttccatggcctggaaggaccttctgtctcccaagaaacagccagaccctgcttatcggtcaaggatgggctcacacctgcttcctctttgcttcttaccatgacattccccagcattgtactataccaccatctttattattttcataggaaaagccaagtattaattaaatatataatgaatattatttgatgttgtgaaatctatgttaattcctgcttatatagagttctggaatattattacttttattcatgtgagggatattattaaccactaactatttcctggttagagatcaaagtcacttctgtgtaatgatagcaaatgtgagaaccagctgaatctgtttgaattacagctggcagtattattcatttcaaaatttttataatttagaagtaaatttttaaaatctagaaatccttttgtgaaatgcactgtctaaaatttagtaataatgaacctaaatacaaaatatgaaaacatatgggtgtaattaactgggattagctgtggaatatagggtttccaggctgggtttccttgatagcatcacactgtttaattgtatggcctttataattctggctggtctctaccatcttaacatattatttgcaattatgtaacaattgtttattttgtaatcaaaatgttggttcatgtgtcctttgactccattggctaagggtagatttgaaaatcaaccctaaattgactcttctgggaaagcatggacggggtgtgtaagagggtgggagtggcaggagtgggggcatctctctttctgatttggacaatttgagcatatcacgtcagagggtatgaatccatgagactgtagactgttggccacttggaggcgctgtggctccacagtgctgcagagaactcagcggaggggtgggagagtggccaagagaggaggactgaaggggatgccctggctgcctgctggcatcagtagagtggatggaattccctgagtggggcctggccatgtagagttaagcacagactatcattgccttgaaagagttggggtgccagaggcctcagtttgcatcaaggagggagtgtctctgctgctgcacgggcagtggagggtgaaggggctggggtggcaagggctggggaatcagtgtcagggcagggacagggcgggcagaggaaagtaaggtgtgatgtgggtatgttggtactgtgttcagtcctcctcacctttagcttctggcctgtgcaagacaggaatagtacatggagtagcagaacctgaggcctgccaaagagtacagtgggctggagtggcctgcaggggaaagtatgtcagtgtggtgacatcacaggtcaatgctcctatcaggaagaagggagcttaggaacttcagaatgcttactacagagacaccagccccaagctaggagatcctgccatgggcttcaggctcctctgctgtgtggccttttgtctcctgggagcaggtgagtcctgggcacaacttgaaagtctccgatcttcatttcttgtccctgaaatgcatgtgggccaacgatggcttcagcaggaggctttcttctgtgccttatggttaacttttgtcttctgacacacaggcccagtggattctggagtcacacaaaccccaaagcacctgatcacagcaactggacagcgagtgacgctgagatgctcccctaggtctggagacctctctgtgtactggtaccaacagagcctggaccagggcctccagttcctcattcagtattataatggagaagagagagcaaaaggaaacattcttgaacgattctccgcacaacagttccctgacttgcactctgaactaaacctgagctctctggagctgggggactcagctttgtatttctgtgccagcagcgtagcacagccctgcatgagcatcagccttctgtgcaataacattcctgccccactcaggaagtgacggtgaggggagggctgccagccagaggggctcaggccctggagagtggacaggcctttcccaggcactctctggtgcttctgtatgtgatctggtttactgctcactgaagctgtgtaagcgaaatattattttacctgtttatatatctgagggacagcagatgtcctggggctcatatttagtagctagctgaagtctattgtttcaacacctctgcactgtccctcctcactccggagatctgtccttttacctggtgtcccctttttgtgtccccaagagcaggatgctaaggtcatatatgaaactgtgatcatgataacttgttccctgacaagtccaatggacacatgatttccaggcaaaacatatccatctattctttattgtgatttaaaaaaaaaagaaagaaaagaaaggtgcagttttctgctctgtagccctcctatgggcaaggccaggtcatctcttttatggagactgtatgaggagggagctttcctaggttcacagcaaatagcaggaaacgttttttatggggcgtgtagtcttcctgtggcggatgcaatctgccatcagtgaaaggacatgaaaaattgttattcattagttaatattttttattcttttttttttttgagacagagtttcactcttgttgcccaggctggagtgcagtggtgctatcttggctcactgcaacctccacctcttgggttcaagagattctcctgccttagcctcccaggtggcctccaccacacctggccagttttgtgtttttagtagaggtggggtttctctttggtggccaggctggtctcaaactcccaatctcaggtgatcacctgccttggcttcccaacgtgctgggattatagagccattgcactaggccaattttttattctttatcaataaatcttttggggcatcctactttgtacaagggattatatcacatgaaatatacaatgaaaaaagataattggaaaaaagggaaattttttaaaaatgaagaaaagggtgtttcttgcatttgagggtatcaaagtctgtaatttttggtatattctaattagtttactcagtttctgatttatacgaatttcctctttcttctctttctctctttggctacctacacacttttgccagattttttaaagtttttagtaacaatatttaacatgagatctaccctttttatagacttataagcacacaatacagttttatactctgtagtcataacgttgtacagcagatctctagatcttattcatcttgcatgattgaaattttatacccattggcagcaactccccatttaccccattccccagaccctgaccgctaccattctagtctttgcttccatgagttggactattttagataactcatgtaaatgacattatgcagatttttgtctttttgtgattggcttatctcatttagcctaatgtcctaccaagtatagtggtgacagttttacttctatcttccacagttcactcgaatagctccttgaccaactgtaacccagaatcataaagataaaggcattcttagaaatataacttcttgtcctggctaagttaacttaacacaacccggtacgggatggattctcccaggttgaggcatctggtcacatacgagtttcaacctatcatggtctccaggatccatttttggcggcaccactgctgcccaggtgactgtggacacaacttagatgtctctgtcctagattttccaggccccagctactggcttttcttttaacctgtgccggcagtctccctccactcagacgcagggatctgcctcctgctcccatctccttcctgaacttccgccctgctggagttgcatggatatcagggcccctggtcaatgtgcggcagcccacggaggcactgggagggaagctcacctctagctgccttctggggcccagttctgttataccccaagcaagtgctctgttctccctttgggctccacagtatgagaaatgcacttcatggattcatagctgacccctagctcagtaatctgatgacaaactttgagtttcactcaaagtgaaactctcagagctgagggactagctctgcatttctctgatgagggtaagaatacagtgctgtagagatgccttcttccctgtgtagacctggcactaaacaggaaaaaccagacagggtaaaagtgcccaaatatgtctgagaagactgaaagaaaatttcctaagaaaatccttctcctgacttcattcagttcctagtaagacacacctcaccctctgacccccatatcagctggtccccccaggatatcacacgtcctagtatctaaccccacagcaactaattcagatactggcctctttccaacctccagaaacggtcttgccaatagagttttgttggccgggcgtggtggctcacgcctgtaatcccagcactttgggagcccgaggtctggtctggtcacctgaggtcaggagttccagaccagcctggccaacatattgtgaaactccgttccttccaaaaaaaaaaaattacaaaaattagctggtcatggtggcacatacctgtgggaagctgaggcaggagaattgcttaaacccaggaggcagaggttgctgtgagctgagatctcatcactgcacactccagcctgggcaacagagcaagactccatctcttaaaaaaaaaaaaaaaagagttttgtcctctgaccaccaggtctatctagatatctaggcagatttaatttacgattaatttgacctcttaatcccattaaagggagaatgaagagcgtatggtttcaatgtaaagtatattcattttattttgaatgagttggaactaagtagtaaactgaggatatcactccattatagtcttaaaacaacccatggtaaaacaaatctctttactaggactttctttttcacattttagttcctagttacccagagtccagaatagttaagagttgaagagtcatgactgagatggtctgtgggggtttataaatgagcattcacttgttgaacaagcctagggccactctctatggaagcagtttgtcagctggtttgggaatttttaatttaaaatatggtacgttctttatcttgtataagtataaagtctacaaatataatttgcatatataggctagtgcctgaagatttgggtaggacaaaaaggaaagaagagataatatttgcagatttaggaagtttcattatataaaacttcaagggctcaggggctctaatttgtgaagatagtataatgaagaagaattagaaaatcagaactctcttctggagcctacactggggttgtcctgagaaaagattatgatatgaggaacataatccatggtgtgcttagcagcccagagtgtagcagacagttcttgactcatgcagttgggggggtgagactggagacacttgtggaaggtactggctgttgaggctgtgctatagcctctccaaaaccccatagatgaatgtcagacaaatatactgccactatgaagaatattaaaagttagcagaattcataaacactcgcaataggcagcctgaaggtttaaattttagcatcatgacatatgacagtttgaagagctgtagttaaatgcacacaaaagagaattgaaacctgaacaagaaaaaagagactctcagaaatcattagataacttttttaaaagcattgaatgggatgtctagaaatgatccctaaaatgactgaaagaaagcagataaattgaagagcagattaaatgctcattgaagagattattattgacttcaaagacaaatcttaagaagttacccaaaacaacacaaaaaattaaatgtataatatgaaacagagaggaagcaacagagaagaaacaatggaggtttcagttatattcgaatatatgtaacatttcataagaattttccatttattcttatgtcattgaagtgtcagagaaagaaaataaggagaatgatatgaggtgatattgtgtgtgatgctagctgagaaatttccagagacatctaaagacctaaaacgtgagtttcaagaattcagataaatcccaggttaaatagttacctcagtgttaaaatagaagaatatgaatgatgaagacacaatttttcaagcagtccaagaaagacaaatatctcgcaaaggaatagactgagaccgacaggaacagtgaagaaagggagttaaaaatatctataaatgcagattatagtcctcattcatcaaagagacaaggagacctcggcagttcatattctgaccccttgggctggtgacctgaaatatatttggctgagtgttctcatttgtaaaccgaattcaatttgcagagatttttttttttttttttggaaatagagtctcgctctgtcgccaggctggaattcagtggcgcgatctcagctcactgcaacctccgcctcctgggttcaagcaattctcctgccttagcctcccgagtagctgggactaaaggcacacacaaccaagcccagctaatgtttgtatttttagtagagatggggtttcaccatgttggccagtctggcagagatttgagagaggtaactttaaaaattagagtcatataaagtgtaggttcaagaaatcttaggtccctataaattctctgacaaatctccaatctagcacagttatttactctctgaaattctggtaacaaagacaagcacagattacttttgcctgattcaatcatgtttcagacacaaagtcatctaaaatgcaaatatagtagtctgatagttcattatgtaaaattaacataaagagttgccgtttaaggaaatatgcaaatgttacctcttatgaacttcctgcttgataactgagtctgatgtgcatgaaggtgtggtgctcctagaaagatatggcttcagtgcaattgtccatcacacaagagagctgatagaagaaggcacagctttattggaaagaagaccacagaggagcctctagtggcttccatgacatcctctccgcccacctctgatttcagccttgctgctgtggacggtgccagttcccattcacctcttgctgacagtgcccttctgcagtgcctgcttggaatgttgctgcttcctgctctggggtcttctctggtatctgaatccacttgggctgtattcaaagacagccagaggtcctgatgctcctggtggaacaggacagggggacaaaagctccaacctgcccattcatgcagatactccagagagcaccctatgctcttggaggtcctgatggattccgtctcctgttgccccagcacaaatacaatattgcacctttatcctggtttctcccttccctattttgttttccttgctctcttacttcttcctggaatcatttcccaaataagctacatgcacccaagtctccccatcacagactttgtcttcagagacagactaaactgtggcagtgatggaatgaagcgaccatcaaaagaccctaccttttgaaggagacaactgtttatcttttattcatatggctacccattcatttaaaaagtcttatgatgatgtatataaactaatcttttccaaatccatttggattcatctggaattcccagcgttctcaggatggctctctgctcccttaaaacttcaaacctattttgaactgaataaacttggattctgtttacagaagtagaatctgcctggactcagataatcattcattcctttcttcattcaataaatatttaatgaattataggtgaagattagattcaagttttgtggcgcacaaagctgatacattttaggtagctctttgcaaaagagagtgcaaaatagcaaagagttgaaaagaccctgtgcaagtgagaaggcctgaggttattcttcatcggcttcatggcaaatacacaggtactgtccaggtacttgggaaacaccagtgcaaaaaacagacaaagcttcaagttgaggtagacaattttaacacataattgttataatttattatacttaataataaattaatttaaaagtagaaggatatattcctggtagatgcttatctccccggagaagttagagtgtcattgagaatatcaacattcttggtaaatcatacctgatttagggaatgatccttggagctctggaattctacatgccttaccttgcaaaatgaaggtcctgatctgaaaagttttttttttttttttttttttttttatgccctggcccaaccatgaggattggcttctttgctgtgtggctcttggtctcccaggatcaggtgagttctgggcatagatgagaaagtccttcctgggcttgtcgggccccaaccacggcctcctatgggggtgctcatgggcctcctccctgtctccacttctgattctgtgtcctctctcactggagcatgattgtgggaattacccatccaggttgcatcaagatgtgcaatagatagcctattgtatctgaaataactattgcagtgttatggactacatgtgagttttgcaccatagcacgtttacaaatccatcaaccttctcccatttggtgaatataagatctgctggatgggaatagaggattttcctgtgaccctagagactccaggtaggtgtagttcttggtgaacatttcatccatattcctaatgagcctcctcttttcttcacaggaagtacagtcactcaggggacttagatggggcagtgtttgtggcttcacctgaagcaaagggagaaaacacccccatgagaatacacagcagcctgagcttggatggtgacattcccatcaggtgtaatgaggtgctacagcatgtaacaagtcttcaagcggtcatgaccttgaacctggaacttggaacttggagacatttctggatgtcatttaaccgagggtatccctgtatgctggcatacaagtgtccagaggttaaacgaagaggaaaataattcaacttggagttgaattttgtgcaggaagtcataaaagtcaccaggactgctatgacaatgttctttagcctacagaaatattcataaaagtgaaaatagtattcaaataaagaatttctcatgatggaaataaaatatacatagaagaacaaattcccctattaaaatcagggaaagagcttaggagtttattagatttctttcaaaacagacctaaaaattattcaactctgttataaataatttgttcctgcggggaagagaaggggcatggcaggttagctccgcagttcaagcattcagcaggaacagtgacatcatcaagtcactgagagcccaacttcagtctgcccacagcagggctgggagacacaagatcctgccctggagctgaaatgggcacgaggctcttcttctatgtggccctttgtctgctgtgggcaggtgagggctggtcacaggagggcctccttccctggaattcccaaggcctcagtgcaggcttttctgttgggatgacagcatcagcatctgttgttctctattacaggacacagggatgctgaaatcacccagagcccaagacacaagatcacagagacaggaaggcaggtgaccttggcgtgtcaccagacttggaaccacaacaatatgttctggtatcgacaagacctgggacatgggctgaggctgatccattactcatatggtgttcaagacactaacaaaggagaagtctcagatggctacagtgtctctagatcaaacacagaggacctccccctcactctggagtctgctgcctcctcccagacatctgtatatttctgcgccagcagtgagtccacagtgctgcacagctgcctcctctctgcacataaagggcagttagaatgactgaggttgcctgtgctcccaagtcccagccttcacaggagtcggagagccctggctagcctgggggccatagagcaggggccatataaaccttgatgttgaggtccattcctaccccagtctcagaccaactggaggtcaccccaacacccttagcttctgcagttccctctttccttttgtaaaatggaaaaggcatctttagtcgagattcctaatttcgttgaaaatttgaaacccaccatattcttctctaccctaagggctgggtgacttttccacataccctttcccctaccctctactgcctttcaactcccaatcataaatctttgcccatgtggtctctgctcctgggggccctttattctaagggcaatagacccacgaggtcctatatcattagccatttacgtacctcttcatcatcattttgcaccatgttttccctggctctctgctccagccacactcccttacatgcagttatttcttcatatgtgtctgttgttttccaccctggggattgtttatataaattctttcttctgcactgagcatacataccacccacttagtcctacatctctacttcatttcttaaattaaagtgtatttcaggcacacttgctcttaattgtaaaaagcaaaaaagaaagtttactagaaaaatttaagaaaagcattttatgcattcagttgagggatgacatttttagaggagacaaaaagccacaagccaaaagaacaacattcataacgctagttgcattaaattgtttcaagccaaaacacaccataaaaaataaagttaagctacagcctgggaaaggcatgaggaatgcatacaaatgatgaaaaatcagtgtgacagagaacattcagtgtaacagagaacattcagaacatcactgaatacctgtagctcctccatggtttctggtctcccttgcagttggaggggtgggaacatgtcaccaggttctgaatagtgggataaaatgatgtcagctcatttcaagcctggcccttaaaaatattctgtggcaccatgttgagggtctctaaatgtactcccatgtttagagtgttggtatatggcatagagttgtactcatggctaagatttattaaagtgtcatagtaaatactctgcagcagaacatgtggagaaaacacacaggcagaatctggaggaattcacaggcaggcttccttatgctctcttcctctcaggaggggtcacacagagctctctctcctcccagcagcaaaaatgcattaacacacgtgcagtgtatctgccaagggagcccattacagacttagcacccaagaggttttagtagaagctggtcacacaggcacctactttttagcatgaaccaaaagtctagatcccaaaagaaaatctgatgttcagcataatattatttgcaacaccagcctaggaacgatgagccacccctgtcagtcaggagaaactttgcatcagttcagggcaccgttcaccagccaagctcccagatgtctgccagagtccaatcttgcaagcaggactttctaagcaccgcagtctccagcctcctgtcaactcttgtgcacagacactcttcaactctcttttgccatgtcctgaactcgggagctacacggtacagattgcctaatgataatatggaagcagcctggctcactgagtcagaatttggtggacaatcacagaagaaagctgctcatgccacactgggctttgtggtcatgggaagtaagacttcatagagctatgccagtgagattttaggatttgttttgtttgttttgttttctgtagcacagctgttcttgtctaagagaattagtatctagaatgagtaaaatattcttattacttagtattaagaagacagctcaataaaaatagcaatactgaggctgagtaggcaattcacacaagagtgaacataagttaccactaaacatgagaataacttcgcaaccttacttacaatcagaatattgcaacctgaaacagtaagttatgatttcaaaattactagattggatacttttccaaggaatgacagtcctacatttgagtagacatatgggctggtgaaaattgtttgtatatttattacaaaagataattacaactacatcagaaaacccactgtgggatatattgtgacaaaccacatttctggaaaatttatcaacgtatttaaatcacttgggttcctttcattgtctttaagttcaataatggagaatgcaactgtcagtgtttttcctattttgaaggtagtctttccatcttttaaaaagtatgataaaatgcacgtaacatataatttcatcactttattttttaaatgtacaattcaatgacattaagtacattcaccttgttgtggaattatcagcattatccatttccaaaattattttcatcaccccaaacagaaaccctgtacccattaagaaataacttcacattctccctcctctggcaaactctaatctattttgtatatgaacgaatttgcctattttagataatgaatttacatgaaaccaggcactatttttccttttgtttctggcttctttcacttagcataacgctttccaggtgtatccacattgtagcatttattagaacttcattctttttcattctcaataatattccattgtgtgtatataacacatttgtttattcattcattagtcaattgacatttgggtggtttccaccttgtagatattgagaacaatggtgcagtcaagactggcctggaaatatctgtttgattccttgttttcaattcttttgggtctatacctaggagtggaacttctgggtcctttggtaattctgtttctcgttttgagtaactaccaaaatatttctttgttgcagctgcacgattttggatttccaccagcagtgtccagtttcttcacaacatttccagaacttgttatttccttttctttttcttttttcttttcaaaaatatgatgatgatgattactgtttttatagccatcctagtaagtgtgaatgatatctcattgcggttttgatttgcatttccctaatgactaaagatgttaagtgtcttttcttgtgcctatgggcaatttgcataccttctttgaaggtaatatttattttatttgattgtgtttttagagtcgctattgactttagatttaagctggtgtacctgtgatgatactaaaggaaattgagattgagattaaacttctcttgggcgatttgttgttggctaagtgtttttaggtgcagtacttctgagacattttgggatactgtagagagagaaataagtaatttattgatatttctgggaattagattttttttacaaagagaagagagatataaataagaaacgggaagatgaggaagaaatctgtggtgctgacttgaattggagttattaatgcaaacttaaggttttaaagattatatatttcctaactttatccagagaagggtctaaaaaacaatacaaagtaaataaacgaatggctatatttgcttttttttgtgctccccagtaacaataggtacattattttattccaaatgttattccttataaaaggctgcttccatatcaagggaaggaaaagtgttagaacatcttttggtagaaatcaagaaaaaggtcagaaccaagaagacatgtccaaaatccacagaagcaatttcaaggggctccattagccaaatccgggtcaatgcaagctttaaagaagaataatgaggatactgaattgtaacaagttataaaaatctataaggctataatgacaatcaaaagagatagataagaatctcttcattacggaagaatgctagttgatatatctaatgagaaaatcaatgcaaccatccacataattatagacaaattccattagtagatgcctaaactaacagtttttgtttccttcaatactttgagttatactgttctactctctcctggcctgttgggtttctgctgagaaatctgctgaaggccatactggggctcctttaaatgtgatatgtttctcactgcatgctgcttttagtattctttctttgtctttgatttttggtaatttgattatattgtgtcttggtgaactcctttttgggttgaatttgattggcagcctccaagcttcctgcacctggatgttgctgtctttcctcagatttgggaaattttcaaccattatttccttatatatgtttttggggcctaacagcatatgtaccttgtttcaaagcatcaatacacagattattacttaattacaaagggtaaagggcacattcacaatggagagatcttggatcagtcatctcaaattaagcattgccaaaatgcataaaaatgacattccatattcttgtgattgaccagatgcaatgggaaatagacatcatctatggtgtatattttccaagtaattaacctctaataatatgaaaatttttatcgtgagctgttttacaagtaagctgaccaggacacttcaaaaatctatggtcatgaaaaacagaaaatataataagtgggtggaggagatgtatcattgaaaagtaactaaagagatccgacaacttcctgaaatacatgatctttgatattgtcccagaggaaaaagtaaatcaaaaccaagggacatggttttggtggggacaaaccacggccaaaccgcaggcggggctctggcaagacagtaggaatagatggagttgggaggaactccccccagtgccgcgcaaacactgtccaatattagccctgattctactgaggacagtgtagacatggccccagtatttctgacccatgaatggagggcctgagcctggtaactctgaaccattcattgaccagcaggcggcactagggtttgctggggttggcttgcttttaaatcagggctcagtgctgtctgaggagttaagtttaaaggaaaagtgtgacttcatcccagcatccagaatctagtttgcagatgtttgagtgtcctgtggaatgtgagccattaaacagaaactcttcatcttccagcaatgccagtatcctctgttcagcagggaaaccccaactgtagcaaatcattgagtgaataatgttctgggcttgcatcagggatagatggaggagagccaggagccagcctgcatgctcacagacccatataaagggagaaccacttcctcctcaggagaactcagagaaaccttagcaattcacctgtaccccacacctaacccattccagttgtgccctggatggtggacaggaggatgtaaagggaacataggagaggggagtggacaattccagacctctccagataggcttagctcaaataaccttgcaaatattctgaataagagccagatttcccagggctctggccttttcttccctgagcagcatgatgatgctccattcctgtcttgacaaggattctgtcatggatttcttggttgtgctgcccaggaagcaggtgaggcccaggaacaatgaggaatgtcgtccctggacttggcatgcctcactcgcaagcacaccatatgtgggtcctgtgattgataggtttgatagatggatacgtcctgtttccagccaccagcctctatcccctgaatgctgttgtcaactcagagccacaactctggtcacaaagatggagcaggtagtggcaccttaatgtgaagaaagtttccatcatgcaattgttacctggtgcctacatgagttagactcaaaccagcagctgtttacctcagtgatagaggatttatgacagaaacagagggctcttgtaattctatacccacaggtattcacctgataaccttcacatgtgtcccctaggttttggggactttgagcctgcctcactgaacacatatatcctcgttcccagctctctggacatgcatctccttgtattattgtcttatgccaactctcaggtgcttcatcccctaactcttcccatcctttaccccttaggcaatgaataaaagtatatttgtgactaatgttgccccattagaaaaaaaatgccagatactagccactgctgttcaattgtaacttatactaaatctgtaaggtttttttttttttaagatttcaacaaatctgattttagatttcttttttcttttgttttgttttttgagacggagtcttgctctgtcgcccaggctggagtgcagtggcgcgatctcggctcactgcaagctccacctcccgggttcacgccattctcctgcctcagtctccagagtagctgggactataggcatgtgccgccatgcccggctaattttttgtatttttagtagagacggggtttcaccgtgttacccaggatggtctcgatctcctgacctcgtgatccacccaccttggcctcccaaagtgctgggactacaggcgtgagccaccatacccggccgattttggatctcttactgtattcacaatgatattttcagggataagagagtccccacccatcttataagatatcagaactttcattacattgatgaccaagaaccataggcagaaccatgatgaagacttggtacacaatgcatcatgaagcttgataacagaaaagagaaagctggccattgaccttcaccaaaaatgaacccttccaactctctctcagggtattattttacccctttagcttagagcatgtcagctggttcaacatgcttctaggataaacctgtgtcaactaccccagctcccactctgtctaagctcatagcaatgagaaaatggagaacctggtaagacagaaatgcccagagagaaggatatacagataagacatagaggttactaattgttgtctgtattttgagttgcctttgacacattcaagtagaaacatgcagcagaagatggccctggagatgcagtgggtgatccaatcccccaagccctagagatgtgagtaaagacacttggatgaacttacacacagtccatgaatacgctaaagcaacttctagctctgttttagttcataacaactggtttctaagaacttaggcacttgtggagacaatgatgttactgtaggaactaccgtataaggacaggatgtcccacctcctctgctcctgttcacaaggaccctgaactggcaaagctcccatcctgccctgaccctgccatgagcaccaggcttctctgctggatggccctctgtctcctgggggcaggtgtgtcctaagaacaccatgatcatcccattggaaattccagtgatttcttcaatcatttctgtctttctgttttcaaattctgtctttttccccaacagaactctcagaagctgaagttgcccagtcccccagatataagattacagagaaaagccaggctgtggctttttggtgtgatcctatttctggccatgctaccctttactggtaccggcagatcctgggacagggcccggagcttctggttcaatttcaggatgagagtgtagtagatgattcacagttgcctaaggatcgattttctgcagagaggctcaaaggagtagactccactctcaagatccagcctgcagagcttggggactcggccatgtatctctgtgccagcagcttagccacagcgttgcagagactttctctcctgtgcacaaaactccagggctctctccgctctactcagctcacagcagcctttccttattcctcatcctctcagggaagaagtgagttttcagatatagctagggttcatatagtgggaggaaatgaactattttcttaaaacatgagcgctatagttgttggttgaaaacatgtcttagggatttgaaacacttctgggtgggaattcaagaaaccaaaactgaaagtgatttatcccagacctagtcctcaggggcagtgatggttgttcttctataaaaaatgcacacaatgttgtacgttaattaagaaaataaataaataaacttgaaaaataaaaacatttaatcaccaaaacgtgtgttaaactttaataatatagatattgattacatgcaagtgacaaacagcaggccctccttctgccgttgtcagcatctgaatgatgtgaatcttatctggctctggagcctcttcttgacctctcactggatgtttcatgcagtcaaatctcaacagacactgtgtgtttggaaatcttttccctctgtttttgtggaaatatgacaataataataatattgtaatgatgatgatgttgatcatttcagctatttcattcagcacactttaaacttcaaagaaatgcacacaaatggttatcctggaaacaattcccaaatcttaactcaaaatgaattttgcttctctggagtgctttaacttttcagtgtaacagacacagcccaacactataattaggcctgggccagctagttcagaggctggtgaagacacttccacctgcctgcctacttccttgtctgcccactaaaatagctccttagtgcattagatattcctgccagaacttcagaagcaatgaactgcccctggtccagttgtctcctctgataatgcactgtgtgtgtccaactctagtctctaccctaacttctgcccagattctcctgtactagaactcattctgaagtactggttagaatgtttgggaaggcagcttcctgggaatcctccgaaggaccatggctgtcagtgattccctcgtaacacttcttgagagcatcttgtatttcattgaacgtaggactcccatttatttcagtctgtctgctcctgttcacctctgagatctctgtggcttgtttgtgttgatttccttttgtgctgcttcttggtcatttgttcgtatttttccttataaacctgattatttttgacatcgtgccagacactatggttgtagaaataatttttggtctaggatggacatatctttctccagagataattttattgtgttttgtaaagtgcatggatacataaacaatccaggactccctgaaaaagaattaaaggcttgaggtgtcctggagcccctggagaacaggtttcctactagttccttgtttcaattcaagttcctcagtggtcaccctcagtaagttctggtcttagccattaccccccagcctgtgaatcagcttcctgagagctgggctgggatcagcaaatgcccctaagggcagtgactgctgtgttcactcccccaggctcctgccttctccaagattctggaccagttgtccctcataatgtttttgggatattaattagtttcagtttttgttagtgtggtaatttacccaactatttaaataataacagaagggttaattttgttacaagaaaggggtcctgatccaaccgccaagagagggttcttggatctcatgcaagaaagaattcagggtgattccacagtgaaaagccaaagcaagtttattaagaaagtaacatggtgaaagaacagctactccacagacagagtagggctttcccaaaagtaacaggaggagcgcatctaccctacgtacaatacttgtttatatataggataagaaaagatcgttgagagatgtgctctgctacaagggtttgtgataaaggattaactttcttaattactatgttttgcaagaatcagtattattatctttaaagagaaattaggaatgtttctgttctcaagatattggggtatcatgacactcccaagtctgggtctgtttagtaaacattattaatctgttgctttaaccataaacatctagaggttagggatacctgattttctgggaatgcagcccagcaaggcccagcctcattttttcacttaagatggagtcactctggtttgaacgcctctgacaatttgagtttcctcttctgtaattactcagatgaaggtcaaagaatttcatttaaagttttaattttctttgaatttcaatgtctgattcttagtctgtgatttgcttgatatttaacttaaatagcatagagaaatgttttactaaaactttaatttcgaggaaaggacttttttaaaaacttgaaggggatttataatcaaattgggacactcacttggttttgacattttatcatttagagtattattatgttgttaattacataaccttcgatgcttcattcgaacagggtaatgagaatagagagtaaatatttaaacttcatcagatctttgacacacctgacaaaaacaagcaatggggaaaggattccctatttaataaatggtgctgggaaaactggctagctatatgcggaaaactgaaactggaccctttcgttacaccttacacaaaaattaactcaagatggattaaatacttaaaagtaagacctaaaaccataaaaaccctagaagaaaacctaggcaataccattcaggacatagacatgggcaaagacttcatgactaaaacaccaaaagcaattgcaacaaaagccaaaatggacaaatgggatctaattaaactgaagagcttctgcacagcaaaagaaactatcatcagagtgaacaggcaacctacagaatgggagaaaatttttgcaatctatccatctgacaaagggctaatatccagaatctacaaggaacttaaacaaatttacaagaaaaaacaaagaaccccataaaaagggggcgaaggatatgaacagacgcttctcaaaggaagacatttatgctgccaacaaacatatgaaaaaaagctcatcatcactggtcattagagaaaggcaaatcaaaatcacaattagataccatcctatgccagttagaatggcgatcattaaaaagtcaggaaacaacagatgctggagaggatgtggagaaataggaacgcttttacactgatggtgggagtgtaaattagttcaaccattgtggaagacagtgcgacgattcctcagggacctagaaccagaaataccatttgacccagcaatcccattactgggtgtatatacccaaaagattataaatcattctactataaagacacatgcacatgtatgtttattgcagcactcttcacaatagcaaagactcgaaaccaacccaaatgcctatcaatgatagcctggataaaggaaatatggtacatatacaccatggaatactatgcagccataaaaaagaatgagttcatgtcctttgcagggacatggatgaagctggaaatcatcactctcagcaaactaacacaggagcagaaaaccaaacaccgcatgttctcattcatacggaggagctgaacaatgagagcatatgggcacagggaggggaacatcacacaccagggcctgttggggcgggggggtcaaggggagggatagcataaggagaaatacctaatgcagatgacgggttgatgggtgcagcaaaccaccatggcacatgtatacctatataacaaacctgcatgttctgcacacgtatcccagaacttaaagtataataaaaataaataaataaaataaagttgatcagagagcagagagtgaacatggaatttacttcattcctgcactgtcgtgactcatttgtgccatgttttgtgagcacacctgaggggcaggggtcagaattggagggagtcacaggtgtgtggctatcatcttttccttcccagtcccctggaaaggtgcttggttccacattttccatttgggggaacttccctaaagtgatacactggtttttgtctattatttgccaaatgtttcttatgggaagtgaaataagttatcttatttagtctcctcttcatctgaggttagtctctcttcatcatcatcctttcatcctggctactgagaaaaaaaagtagattcttttggtgctttttcaacatacactaagatcagtggagaactttctttccttacagggttggcctgtagtttgcaggggagagagaatggattaaattctgatacagaatagtgtgggttggcctatttgctctcctatctgagcactattagttattaacactgatattttatctccacttgtctgacttcaatgtccacctctcaggtggttccatcttaggccatagcaacattaagattgctttctgaccttctaacaccaacaaatcataattcccatatctccatgactcaacaaagcaaagcacaagtcccctgtgtcctggcaagagagcagatttgtgctgtttctgcctactggccacaaggaggcactgtggctttgttgtcatcagagtcaaatggggaggggcgaagatggctctctggaagattcttaagggaaaccctgggtttggccctagattcagggagctgggctgtctggaatgaaggctgggaatgaaggaattagagaccaaccaatttgcctgtattgttgtggagaagggttttgctctaaactgagctctgaatggggctgagtggcaggtgtgcttgcagtggatatatgtctgagcgcccttaagatgtggaggcacaagtagctggggtggtgcagtgcccaggttctgggctgggaaagcagagaagcagttttcatgttacaggagccttggagagcctggccccaaacccccaaaccagctcaggccagccctacctgctctgttaaaagtagaaggaagagcagggagagacggaggtgctaccctggaccatcggagggaccctgttccccagtgagggggcaatcacaattacaacaccagtagcatatacacttattaggcagacactagggtggagtagaacagagttttctccaccaagaccttttgctctcagcaggaaaatggcccagtctattaatagttcacctctgctactcacttcagactcctgtgtgtcccctggaagaaggtggggtctgggtagagatagtatcttttcttttggtttgaattaaagttctttccatatgactcgttcatttgcctctacctgtatcttgtatctagcttctgcctcttgtattcatgtgtgccttggacactataaagtatttgatttctactgctgctgtaatgaattaccactgattttggaggtttaaacaaaatacatttgctaccctacaatactggaggccaggagtccaaaatcagtgtaactgggccaaaatcaaggtgttggcaggcctgcgttctttcccagagctctaggggagaactgtttttctccccttttcagcttctagaggctaccagcgtgtcttggcttgttaccccattcaatcttcgaaaccaacagggactgactgagcctttgctcatgctgcatcactctgacactctttgtcctccctcttccacattttaggacccttgtgactacattggacccgcctggaaaatccaggacactctcccagtatgaaggtcagctgattgacaacctgactttgtgtggaactttaatttttcttttacaagtaacttaacacattcctaggttccagagattagacctggacgtggttggagggcctttgttctgcctaccaaacctaggaacttggtaagagggaggaaaacaaaatgatcacctggaaaccagaatactgaccaccgttttacatcccaggcctaacagacacaaaaagggatggagcccacaaggaaatagacacctcaggtctcacaagctcgtctgtaaactatttgctccttaggatcggaaagtactctggggtgcaggggactcagcagtatgcctctgtgccagcagcaaaaatgtggccctaaactgctccttcttggttagcaattaacccagttgaccaacccacagagcagaggcttctctcagctctgtacactctacaccctgagaggaagtcggcttctgagatgcaagactcttttataaggaaaagtccagttgtaaagattaagaaactttgagctttgctagaggtaaaaataggatgtaagtcaactctggagcatttaatttccaaatgtttatgaaaaagacaatcttcttcctgttttattgtatggatagagaatgagagagattctgtactctgggctttgcaaactcactagagttcaagaataaatacactcagagaggtctttcactgcaaagaagagctttgaaatcgaatgaactttcaggatatcagttcggctcctgtatctctaacaacgcagttgacatgcttgcccttcctagggatctcaggggccaactcctaactcacttgtggataattgaagtgcattcaaaggagtaggagcacagagacatcagggagaggaataggagagtttgcagagaatctggcttgctgtaagacaatgagttcatcttgaaataattggagtgtgaggtgcagatgaatatagttggcaagatcctaggtaagatatactatagagaaggctttatgaattggtaatatcaagacaaatccacagagagcctccgtaggtgtgcatttgtgtctcagatcaattatagttcagtcctgcctgattcatctcccagagatgcagcctccacttaaataaggagctttcaaattggaggtggtggcccattcagtgacgtcactgacagatgcatcttgtgtggataaaatgtcacaaaattaatttctttgttcatgctcacagaggccctggtctggaatgttccacttctgctctcactctgccatgggctcttggaccctctgtgtgtccctttatatcctggtagcgagtgagttctccgatatttattatggtcatgctggacctctgtctagatgactccttatattttccttattctttcccccaattctgtcttcttttatagcacacacagatgctggtgttatccagtcacccaggcacaaagtgacagagatgggacaatcagtaactctgagatgcgaaccaatttcaggccacaatgatcttctctggtacagacagacctttgtgcagggactggaattgctgaattacttctgcagctggaccctcgtagatgactcaggagtgtccaaggattgattctcagcacagatgcctgatgtatcattctccactctgaggatccagcccatggaacccagggacttgggcctatatttctgtgccagcagctttgccacagcactgcagaatctccccatctctgtgcagaaaccctggtgcttcctcttctccccacagctctcagcagtcgtcagcaaagtctttcctgctctctgctcaccatggctcacgcctataatcccagcactttgggaggccgaggtgggtggatcatgaagtcaggagatcgagaccatcctggctaacacagtgaaaccccgtctccactaaaaatacaaaaaattagccgggcacggtggcaagcgcctgtagtcccagctactcgagaggctgaggcaggagaatggcgtgaacccgggaggcggagcttgcagtaagccgagatcgtgccactgcacttcagcctgggcaacagagcaagactccatctcaaaaataaaataaaataaaaattaagtgggtttggagaatgacaaagacagaagatggtaggatattaacataaaaaaaatcatgtgtaggggataatgtagaaaatgtgttttgtgaatttctcacaaattgtctaaggagtcagaattcacaggcatgtaagataaaccttaattacccccactgtaggtttccttgtctccaggtatttgccatccgcattagcaagctgagagctcctgagaatggctatgtcttttgaactagtctgccctctgcattctattttcaccctaagctgtgaacagaaatttcccccacaagttttcttgattgtaaaagaaagttcttttctatggcattccttataatgttaatttcaacttaccatttatatagggattttgcattgcacttaaagagtaaacctcctgtgggtaatacaggcagtgaaataggttagatgtaagctgctcctcctggactctagggatctatttgtctttatcctgcttaaggagagccaagttctagctgaaggcctgtgccaactcacaggacactgacgtggtctcttccactgcctgcttggagctatccacatgtatccacacaggctgtctaaaagcacacaggcctggccagtcttactttgacctctttcctccctgatgctgtgtcctggacacgcatatctatatattttttctggtttatgccgcgtatttctacacagcacttgcaattcattctgaagaattataatttctttcttctatagtagtacttacatactgatcacttctcaacccctatcagggtatcattggcaggtgttgcaaactattcctgtattttgagtgcccaagacaatttgagtttacctgagttcttccatataggcctaggtttcacttgtcattgtctagttttgttatttaaaggccaaggttttcaagatcacaacagtacagaataaaattcaggaattttttaaaatgtacatcaaccgacctactctgtgtttatctattgtcctggtgtctcccttgctctttgggcttctctttgctgcctccagatcactttctttcctccttttttgaagcccagctccttacatacatgacgttagaacaggacccttcattgctgcacttgcttttttcccttcagaactctcttcccattcagtcctgtctgctactaatcctgtcatcattcttaacgactactcatcccacagaccatttttacattggtttggctcctcacttttgaggattttttttaacctactttttttttaagaattgcttccatgattacagtaaatatctactgaataaatgcatgtcttcctcagcttggagatttctgagggttgcaactttgtcgaatattttatccattaatcctaactgtgtatattagacaaggaaggtattaaaaatcatgttttaaatcagaaaatcaataaatagatttaaagagacaaatgcaaaacaaaactgtttagagctgctgttctgggctgaactacagatggactgtgtaagaaatagtaaaatcatctggtaatttcaacttatctttagaatctttggccggaacagctccagggaatcaagggatcataggtggaaagaaagacaaagaggttaaggaagtgagaactggctagggtagcattctctaccttaaggttttcaaacataatatcaaggtcctcagtttatttgtaatttttttgaggatgaaaggaaattatgcacgtgacccaaggtatacacaataaggaaactgacacatgactttgctgagatggaattatattaaagttctgtgacactcacaaactcatctcatgctgattagaaactgtgattggcaatgctgtgtgttacaaaaaaattaaaaaatgattcctttaaaaacattatttctttaaatcagcattttccaaaaatgggggaaatattaaatactatccaattttggtggtgcaaaaaataaaaaagcttaggggcttccagtacccctgacccagctgaccttcctttcccaggcccatgtcttttaatgtgcatttactcagggaaagggaagtgtggctgtgcaggaaaagtggcaatttagaaaacacaggctcaagggcttgatggagggtcccagaagagggcagggcactggtgatcagaggggattagagggcaagctgctagggtaagctgtgcatcagaagtggttccttttgtttccttcagcagtaaatttttattatcattattactttagctgtcctccatatctacttctttagtatggctggctacttctctttccaactctttatgcactaccgtggatctcaccctaggcagaaacaaatccccaaactctcaccagctgcgctcatgaaacaacccttcctggcaggctgtgatctcgccaagagcgatcaagttgatcaagctataaactgacttcatcactagtctaaagaggaaactgtggcaagaacagctgcaggagaaaccctaattacaatgggaggagagacataaggattttaaagcagttttcaaactagtccttctcaagaaccaaacatataagggatcactgggagctgtctctgaagtgggttaaagagaaaagaacagacaaagataaggttctgatgcctgctctctgttcctacagatctctccagaagtcactgtagacctgctacaatttccctcactttgctgtgacacagcctttcttcgttggttcctcctccctatgacttaaacctctctccctcccctcccctatctccattcttccagaaaattcctctgccattcccagagacttgcagaacactggggtttgaaatacattaaatagattttttttaattaataatgatctctgttaagtaacaaaagtttcatatgtgaattgtgcacaaaaaaattatagtaaacttctgagataatgttagaaggcttatgtaatgatcaggctagctttgatgaaggaatttgggactcagggtgagaagacaagataagttagtagacaataaaatgagttgatttattctgtagtagttgggaacttgtttaaaaaaatggagaaagaaattgttgaaaaccctaactccctcaagaggtctgggaatcctgtagcttacatggaatagaaactgaaagggaatcgcttgaacccaggaggcggaggttgcggtgagcagagaacatgccattccactccagcttgggtgacaagagcgaaactacatctcaaaaaaaaagcatgatcaaatttgaatcatagccaaatcttacaaaaattttatgtgaaatatttaattttgccaaaaaaaaaattgatgcaatgacctctacccttgttcacctttttttatcttcactatgtcacagagagtttggcacataatagatgataagtaaatttattttgactctattgagtaaatgacaataatatttcacattctctcaatataatagttgaattctatgtgtactttcttacttagcagagtttcacttcaaaaggggcttcgtcctccacatgaaatacaacagagagtcattatggctagtctcaattttccatacaacttctgcaatattccaagcaaatgtgtttccccagtcaggattaatgaccaatgttacacagtatcctaaccacatctaaagctggaatttgcaaacatccttttggaacaaagaaatttatgttataatagtatttatccagtctcatgatctggtaaaataaattcttcaccacaaccacattttcccaaaaccacattttttgaggctggaaacatcatcatctcagaaagcaccctaaaacactgtaagaaaaattcaccgtgctcggtaatagaatcttatcatccttgcaataagaagataccgtgtgtatgagtgcgagtgtgagagtgtgcatgtgtttatatgtgtgagtgtgtacacgtgtgtgtgtgcattttctcatggagactcatccacatgaaaatagtttctctttggatttcattactaagaggcactgggtgattggtggagctcataggcagttctggggagtgacaggaaatgtcagaccactcaatctgcctaagttatagctgatagggttgtttatttcaagactttctataaattaagaattaaatatgaaaaagcccagagacctccattataaaatgcactatctaaaattctgtaaataatccaagtacaaaatatgaagagatatgtgtctgatcaatcaaaaggagacatggaatatcgcgtttccaggctggatctgtttgatctcttcaagctgttttactttatgccctgtgttattcagggttctctctttcatcttatcatatgaattgcaattatgtaacatttatcagcaatcaaaatattggttaatgcacccttttgtctccactggctaagggtggatttgaagatcaaccctaaattggcctgcttgggaaagcattgaggttgtgtgtgtgagagggtagggtttgtaggagcggagatgcgggaatccctgttcctgatttggacaatcttgagcacatcagttcagaaagtgtgaatccatgagactctggacagttggccacgtggaggcactgtggcttcacaatgcagtggggaaccttggagagcggtgggagggtgacccaggagaggagggctgaagggaagcctggttgtctgctggcatcagcagggcaatctgagttcagagtggatcctgagttaaatactgccagagaagggtaggggtgccaaaggcctcaatttgccccaaggaaaaagtgtctctgtgtctgtatggacagtggagggtgctgaggctggggtgtcaagggctggggaatgcttctcaggacagggacagggtgggcaggcataggaaaataggggttgttgtgagcatgtgggcactgtgctgcacctgccccacctttcgtttaggggccctgcagaccaggaatggaacatggaatagcagagcctgaggcctgcctaagtatgcagtgagctcacagtgtcctgcagggccagtaactggaaaggccagtttcctatggaaatgccagaaatattcctgccctgactgaggttcaggatctggtggcagcctttcccaggcactctctgctgcttctttttttttttttttgagggcatcttgctttgctctgtcaccaaggctggagtacagtggcttgatctcagctcactgcagcctctgcctcctgggttcaaatgattctcctgtctcggcctcctaagtagctgggattacaggcacccaccacaacgcctggctaattttttgtatttttaataaagatggggtttcgccatgttggccaggctggtctcaaactcttgacttcaaacaatctgcctgcctcggcctcccaaagtgctgggattacaagtgtgagccactgtgcccggcccctctgctgcttctttatgtgacctgttttaattctgacagaaatcattcaaaataagtattatcttacctgtttatacatttgactgaagcagctttcctgggtctcacatacgcttagatggaagaaaccagacctggcattggatagatcagtagtagtgtgacagtagttaacatcagccaattatgcatttcaaaatagtgagaagagaataattcaaatgttcctagtctaaagaaaagataaatatttaagataatgcctatcccaatgaccatgatttgattatacaaatgtatcaatgatcatatctacctaaaaaatatgtacatctaatatacatcaataaatagtgaattaaaaaaaagataactggccgaagcctgttcctccaacacctctatccactgttcccactctgtagatttgtcctctcacctggccttccgtttccaggtccccattagcaggaggggaagattatgccacatatgtgatcattatagcctctccactgacaagtccaaggaggatatgacttccaggcaaaacatcttttcatctttcattgtgacaaaaatcaaggttcagttttctccactatagcagttctatgggtgaggccatgtgattgcttttatggaggctgtgtgaggagggaggtttctcagctgcacagcaaggaaataagatgttgtttaaggaaagcacagtcttccagtacctgatgcaatttaccatgagggaaaagacacaaataattgctattcattagttaattttattattttttaataagacacaaagtcatctaaaatgcaaagatagtagtctgataattaggtaaaactaacataaatggttgtgtcttaagggaaagtaaaaatgttgccccttacagcacttcctggttgatactgagtctgatatgcaagaaggtgtgatgctcccagaaagctgtgaattcagagcaatcagcaatcccacaaaagagctgatagaagaatgggcggttttattagaaagaagaggagcctctagtgccttccacgacatcctcactgcccacctctgatttcaggcttgctgtagtggacagttgtgtgcaagtccccattcgcctcgatctggcagtgcccttccacaggtgcatgctgggagtctctctgcttcttccccagggctgttccatgatattatctgagcccacctggcctgtactcaaagacagccagagctcctgatgcccctgctgagacagaggactaatgctccagcctgcccattcatgcagaaacttcagacagcattctgtgtgctcctgagaggccctgatggattccatctcctattgctccaacacaaactcttttgttgtttgtgcacttttatcctggcttcttccttccctattttatgtttcgttcctacttcttcttcctggaatcatttcccgaataagctacatgcacctaagtccccatcacagactttctcttcagggatagcctatactgtggcagtgatgggatgaagccaccatccaaagacccttccctttgaaggagacctttgtttttcttttactcataccgctacccattcgtttaaaaagtcttatgatgacatatataaactaatctcttccagattcatttggaattattcctgaattctcagcagcctcaggatggctctctgttcccttaaagctctgaacccaatttgaactgaatagacttgggttctctttacagaagcagagtttgcctggacccaggtaatcattcattccatttttcttccattcaacaaatctttaatgagctataggtgcagagtagattcaaattttgtggggcacaaagctgatacaattttaaggagctccttgcaaagaagaatgcaaaatgacaaagtgttggaaaggtcctgtgtgagtgagaaggcccgaggttattcttcattgatttcatggcaactacataggtactgtccaggtacttgggaaacaccagtggagaaaccagacagagcttcaagttgaggtagacacttccaaaaaattgttataacttattatactgaataataattaaaaagtaaaaggatatattccccatagatgcttatgtctccagagaagttagagtgctgttgaaagtactgacattctgggtagctcacacctcatttagggaaggatccttagagctctgggattctacgtgccgtatcccaaaaatgaaagtcctgcactgaaaagatttttttttcccctgccctggcccaaccacgaagattggcccctttgcttggtctcccaggaccagatgagttctgggcatagatgggaaagtccttccttggcttaccaggccccagccacggcctcccatggggatgctcatgggcctcctccctgtctccacttctgattctgtgtcctctctcactggagcatgattgtgggaattacccatccaggttgcatcaagatatgcaatagataatctattgtatctgaaataacaatagcagtgctattgactggatgtaagtttggtgccaaagcacgtttacacctcctccaatcttctcccatttagtgaatacaagatcttctgaatggaaatagaacatttccctgtgaccctagagactccagatagttgtagttctgggtgaacatttcatccacattcttaatgagcctcctcttttcttcataggaagtacagtcacttatgggacttaggtggtgagtgtttgtggcttcacctgaagcaaagggaaaaatcatcctcatgagaacacaccgcagcctgagcttggatggtgaggctcccatcaggtgcaatgaggtgctacagtgtgaaacaagacttcaaatgttaaagaccttgaatccacaactttgaaacctttctggatgtcagttgactcttttaaccaagggtatctctgtaggctgaaatacaaatatccagaggttaaacaaagtggaaaataattcaacttggagttgaattttgtacagagaagtcataaaagtcaccaggactgctatgacaatgctctttagactacagaaatattcataaatgttaaaacagcattcaaatgaagaatttagcataatgggagtaaaatacgcatagaagaacaaattcccctattaaaatcagggaatgagattacacattttaagatttctttcaaaacagatctacaaatttttcccaatctaagcttctcaagtatgtctataataaatgatttgttcctgtggggaagagaacagatgtggcaggttagctctgaggttcaagcatttagcagggacagtgacatcatcaagtcactgagagctcaacttcaatttgcccacagcagggctgggagacacaagatcctgccctggagctgaaatgggcaccaggctcttcttctatgtggccctttgtctgctgtgggcaggtgagggctggtcacaggagggcctccttccctggaattcccaaggactcaatgcaagcttttctgttgggatgacagcatcagtgtctgttgttctctattacaggacacagggatgctggaatcacccagagcccaagatacaagatcacagagacaggaaggcaggtgaccttgatgtgtcaccagacttggagccacagctatatgttctggtatcgacaagacctgggacatgggctgaggctgatctattactcagcagctgctgatattacagataaaggagaagtccccgatggctatgttgtctccagatccaagacagagaatttccccctcactctggagtcagctacccgctcccagacatctgtgtatttctgcgccagcagtgagtccacagtgctgcacagctgcctcctctctgcacggaaacggcagttagaaaaactgaggttgcctgtgcacccaagtctgggccccaccctgggacgtctcagcccccataggagtcacagagtcctgcccaggttgggggggtgtcttagagcaggggccatatgaccctcagtgctgtggctctattcctacccctgtctcagaccatctggagtttgccccaacacactaaccttgctgggtctttcttctgcagctctctttttctgcttgcagaatggaagagatattttgttgatattcctaattcccttcataatttcaaagccaacatattcttctctcccttatgggatcagtgacttcttcgtgtaaaccttaccgtatcctctactacccttcaactcacagacacaaatcttcccccatgtggtctctgctcctggctgcctttcttctaagggcaatagccctacaaggtcatctatcatttgcccttcacctgcttctccatcatcattttgtttttttttttttttttttttgagacggagtcttgctctgttgcccaggctggagtgcagtggcgcgatctcggctcactgcaagcccgcctcccgggttcgcgccattctcctgcctcagcctcccaagtagctgggactacaggtgcctgccacggcgcccggctaattttttgtatttttagtagagatggggtttcacggtgttagccaggatggtctcgatctcctgacctcgttattcacccgccttggcctcccaaagtgctgggattacaggcgtgagccactgcgcccagcctccatcatcattttgcattaagtttcccctggctttctgctttagccacactcccctacattcagtttacacgttcgcaggtgtagtgttgttttccaccctggggattgtttatgaataatagattatttctacttcactgagcatatgtgcctccaacttattcccaggcctccacttcattccttacataaaagtctatttcaggtacatttactcttaactgtaaaaagcaagacaaattttatgagagaaaaattaagaaatatatttttagcactcatttgaggaattagttttttagatgacacataagaaaaccactagccataaaaatatttgaggccgggcgcggtggctcatgcctgtaatcccagcactttgggaggctgaggcaggcggatcacttgaggttgggagttcaagatcagcctgaccaacatggagaaaccccgtctttactaaaaatagaaaattagctgggcatggggtgcatgcctgtaatcccacctactcaggaggctgaggcaggagaatcgcttgaacctgggaggcggaggttgctgtgagccgagatcatgccgctgcactccagcctgggcaacaagagcagaactccacctcaaaaaaaaaaaaaatttgtaactccagttgcattaaactaaacttttgtacaccaaaacatagcataagaaatgaaatgttaagccacagcacaggaaaaaaatgaggaatgcatgcagatgatgaaaaatcagtgtgacagagaagagtcaggctcacccatggctcctctatgcttcctggcctcatttgcacttggagggctgggagcatgtcaccaggttctgaatagtgggaggtgagtaaaaataatgttagcccaatttcaagtctggcccttaaaaatatcctgtaggtccatgctgagggtccctaagcgtactcccgtgtttagagatgtggtatatggcatagagttgtactcacagctaagattttctaacatgtcttagtaagttgtcagcagcagatcatatggagaaaacacaggtggaatctgaaggaatccaaactcaggcctccttatgctgtcttcctcccggggaggtcacacagggttctcgcttcactccgtagcaaaaatgcattaacacatgtgcagtgtttctaccaagtgagtccaacagagactcagcactcatgaggtttcagaggaggctggtcacaagcacatactgcctagcattaaccaaaaattcagactccagaaggaaatctggtgttcagtacaatactgtttgcaacaccagtttaggcacaacgagccgctcctctcagttaggagaaactttgccagtgcagggcatcactcatcagccaagtggccaaagatcagccaaagttcaatcttgcaagcaggcagtctcaagcctgctgtcaactcttttctgcacagacactcttcaactctcttttgccatgtgtggatgaatttgggaggtcatggcacagattataaactggaagcagcttggctccctgggtcataatttggtggacagccatggaaaaaaagctgctcatgccccactgggttttgtggtcatgagaggtaagacttgatagagttcagccactgagattttaggatttgttttatttatttttttttctgtagcataggtgtccttttctaataaacttagtacataaatgagtaaaacattcttattaataagacgacagcccaataaaaatggcaatactgaagctaaataggcaattcacacaagtgaacataagttaccactaaacatgagaataacttttcaaccttacttataatcagaatatagcaacctgaaataataagttatgattcaaaaattactagataggaaacttttcaaaggagtgacagtcctaaatctgaatagacatttgaactaatgaaaaccgtttatatatccactagaagagataatgacaaccacatcagaaaacccactgtgggatatattgtgactaatagcatttcttgagaaattatgagtgtatataaatcatttgggttccttttcttgtctttaggttcaatcgtagaaaattcaactttaagtatttatttttcctattgtaaaggtagttttttaaaacaatcttttaaaaaagtgggctgggcatggtggctcacacttgtaatcccagctactcaggaggctaaggcaggagaatcgcttgaacccagaggcacaggctgcaatgaaccaagattatgtcactgcactccagcctgggcgacagagtgagactccatttcaaaaaaaaagggtgggtggcagggggaaatatgtgtaacatataattttgtcactttatttttaaattgtacaattcagcagcattaagtacattcactatgttgggaaactgtcaccattatctgtttccaattttcttttcattgcctcaaacagaaactcaatacccactaaagaataactccacataccccctctttctgctaacctctaatctaatttctttctgaatgaatttgcctattgcagattatttatgtgaaaccatgcactatttttccttttgtgtcttgtatctttcacttagcttaatgctttcaaggtgcattcatattgtagcatttatcaaaacttcattccttttcatttctcaataatattttgttgtatgcatataccacatttgtttatccattcattaattgattaacatttgggttgtttctaccttgtagatattgggaataatggtgcaatgaatattggcctgaaaatatctgtttgatgccctgttttcaattcttttgggtatatacccaggagtgaaacttctgggtcctttggtaattctatgtttctccttttaagtaactaccaaaatggtttttttttggttgcagctgcacaattttagattcctaccagcaatgtcatttcttcacagaattgccagcatttatttcttgtttttcttttcaaaaatattatgatgatgatgattactattttgtatagccatcctagtcagtgtgaatgatatctcattgtggttgtgatttgcatttctctaatgactaaaaatgttaagtgccttttcttatgcctatgatcaatttgcacaccttctttggaggtaatgttttttgtctgattggcttttttggggtgtctcttgactttagaattatgttggtgtactgcgacaatgctaaaagaaattgagtttgaacttcatttgggaggtttgtggttggtagtgtttttagtgcggtacttcttaaacatttttaatataccatagaagagagaaaatgattacattttgatatgatttggctgtgtcccaacccaaatctcatcttgaattgtatctctcacaattcccacgtgttgtgggaggaaccctgtggggaggtgattgaattatgggggccgggtctttcctgctgtctcgtgatactaaatgagtctcttttagatctgatggttttaaaatgggattttccctgcacaagctctctcttttatgttaccatccaagtaagacatgacttgcccctccttgccttctgccatgattgtgaggcctccccagccatgtggaactgtaagtccattaagcctctttttcttctcagtctctggtatgtctttatcagcagcatgaaaatgaactaatacatatcgtgatttagggaactcctttttggattgaatttaactggcaacctctgagctttctgtacctggatattgctaactttttccagatttaaggaattttcaaccatgttttatatatgcttttgggactggaacaggatatggacatttttccaatgcatcactccacagattactactcagttacagagggtaaaagacatattaaaaatgaagagatccagtgtcagttacctcaaatatacattgacaaaactgcataaaaatgacattccacattcttgcaattgaccagatacaataggaaatacacatcatctgtggtgtatatttgccaagtaactaacctctaatagtatagaaattcttgttgtggctcattttacaactaagctgacctaggcacttcaaaaacttataatcatgaaaaacaggaaatataataagtgggtggaagagatgtataatttaaaagtaactaaggagaactgctaacctcatgaaatacgtgatctttgattttgttctagaggaaaagtgaatcaaaaccaagggacatgctgagacaactggagaaatttgaatgtgaagtatgtactagatgacaatgctatgtgaatgctaatgttttgagcgtaatagtgacatttgtggttatataagataatgccaattttttaggagactcattttattattaaggataaaatgcttcagaaattgagggcaaaatatatatagagagatcaagcaaaatcacaaaatgtacaatcggcacacagatatacattttaatattctgattgtttcattattctctcaccttttccatagatgttcagtttaaaaaaattgaagaaaaatattaacagaccaaaataaaatgttggtgttatttcagagtaataatgttgttgggtatttcttatattcatttttaatatatttgaaatactatgtcattaccataaaataaatatatcaaataaggtatcttttagtctagagtatacttttttaaataggagacaggctatgatttttaagaaagtcccaaaagaaaacaagagaatttgcagtctgaggacaaagcagcttggtatctctgagaccagtgcaaaacttagctagtaatgcatgtcaagaggccttttagcaaatatacaggactgttttctctgtatcaagagattctgagtattctacagtttggctgaaaactcaagaactttcaaaggtgactgaatgtaaagagaagagtagtgattttccaaagttagggctggacaatatgtatttgttcaacaaagagggaggctgtctcagtttatcctctgctgctatagcagaatacctgaggctgggaaaatgtataaagaaatttataaggaaaagggctttatttggcttgcaattctggaggctggaaagaccagtagggcatcaacatctactgaacttcttttgagggctttgtgctgtgtcacaacgtggaagagaagtgggagaaatgagcaggcctgtgcaaggagagccaggatgagcaagaccctcactttataacagcctgcttttatggtaactaatccagatgctggagagagagaactgactcctggcattaatctttgatgagggatctactcccatgacccaaacaattcccataaggctcacactaccccagaaaaatgtgagcaatgtgcctgtagcaacaccactacattgacgaataagcttcaacatgaattttggtgggaacacaccataactaaactataggacaggctctagcaagacagtaagaacaggtggaactaggaaaaaattttccctggtttctcacaaacactgtcctatattagccctgattctattgaagatagtatagaagtcccaccagtatctctaagccatggaccgaggacctaagtccagtgacactggccatcagaaggcactggggtttgatgatgctcaaatgtttttgaaacagggctcagtgctgcctgagatgttaagtttaaaggaaaagtgtgtatcctagtatccagtatcttgtttgcagaagttgtgagtagtcagtgaaatgtgaaatattaaaaaaaaaaaccctttatctttcattggtgctggcatgttctgctcagcagtaaaatctgaactgtagcaaatcttttgagtggagactcttctgggcttgcatgggaggtagatggaggaggaccaggagccagcctaaatgctcagagacccatgcaaagggaaaatgactggctcctcaggagaattcagagaaatgtgagcaatgcacctgtacctcacaccttacctattctagtcgtgctctggacaatgtatacgatgatgtaagggaaatataggagagtggacaattctagtttatgccagataggctattccaaattgcaggtagtaactacagatattcttaacaaaaaccggatttcccagggctctggccttttcttccctgagcagcacaatgaccagttcctgccttgacaagaattctgtcatagatttctcagttgcgctgcccaggaagcagatgaggcctgggaacaatgaggaatgtcttccctggacttgacatgcctcacttgcaagcacaccacatgcaggtcctgtggactgataggcttgatagacagataagtcctgtttccagctaccagcctccatcccctgaatgctgttgtcacccagaactgtaaacctggtcacaaagatggagcaggtagtggccccttaatgtgaagaaattttccatcatgcaattattacctggtgcctacatgagttggactcaaaccagcagatttttacctcagtagtaaaggatttatgacagaaacggatggctctggtaattctatacccacaggtattcacctgataaccttgacatgtgtcccctaggttttgcaggtttggtggaatatctctgagtgcacctcactgaacacatatatcctcattcccacctccctggacgtgcatctccttgtgttattgtcttatgccaactctgaggagcgccatcccctaactccttttatttcttattactcaggcaaggaataaaagtgcgtttgtgactaatgttgccccattagaaacaaaaaatagataatgaccactactgttcaactgtaatttacactagaggtatagctataaggttatttttagatttcagcaagtctctttgattttgcatttcttacaatatatactgatattttcagggataagagaattccccacctatcttcgataaaaatgagaacttactttcattgcactggtgacccaaaactacaggcagagccatgatgaaggcttggtacacaatgtatcatgaatgataacagtaaagaggaaactgttcattggccttcactaaaaatgaacccttccaactctgtgcccaggttattgttttatccctttagcttacagcgcgtcagctaattcaacaagcttctaggataaacttgtgtcaattaccccagcttctaagtgcataggaccaggaagatagagaacctagtaaaagagaaacacccaaagagaaggataattgctgataagacaaagaggtcactaactgatatctctgtttcgagttgccttcaactcgaaacatccagcagaggatgggcctagagatggagtaggagatccagtccccaagccctagagatgtgagtgaggacacttggctgaacttacacagtctgtgaatacagtaaagcaacttcgtgctctcttttagcttataataattggtttctaacaatgtaggcatttgtggaggcaatgatgtcactgtgggaactgccatgagaggacagggacgtccctcctcctctgcttttgctcacagtgaccctgattgggcaaagctcccatccttccctgaccctgccatgggcaccaggctcctctgctgggcggccctctgtctcctgggagcaggtgagtcctaggaacaccatgatcacattggatctctctgattatttcaatcatttccttctattttcaaattctgtctttttccttctcagaactcacagaagctggagttgcccagtctcccagatataagattatagagaaaaggcagagtgtggctttttggtgcaatcctatatctggccatgctaccctttactggtaccagcagatcctgggacagggcccaaagcttctgattcagtttcagaataacggtgtagtggatgattcacagttgcctaaggatcgattttctgcagagaggctcaaaggagtagactccactctcaagatccagcctgcaaagcttgaggactcggccgtgtatctctgtgccagcagcttagacacagtgtagcagagacacttccctcctgtgcagaaaaccagaaaaccgcaggactctctcctctctactcagctcacagcagcctttccttattcctcatcctcccaaggaagaagtgagttttcagatatagctaggactcatatagtgggaggaaataaactttttcttttcttttctttttttctttttgtttttgagatggagtcttgctccattgcccaggctggagtgcagtggtgcgatctgggctcactgcagtctctgcctcctgagttcaagtgattgtcctgcctcagcctccccagtagctgggatgacaggcatgtgccaccatgcccagctaatttctgtatttttagtagagacgggattttgatatgttggccaggctgatttcgaactcctgacctcaagtgattcgcccttctcggcatctcaaagcgctggaattacaagcttgagccactgtgcctggctggagataaactatttcttaaaacatgaaggctgcagttgttatttgaaaatatgtctaaggaatctgaaacacctatcggtgagaattcaagaaaccaaaactgaaagtgacttatcacagacttagtcttctggggtactaatagttgttcttgtatttaaaaaatgcatacaatattttatatcaattaaaaaatacgtaaatttgaaaaataaaaacatgcagtcaataaacatgtgtgataaactttaataatacagataatgattgtatgtgagtaacaatcagcaggttttctctctgcagttgtcagcatatgaataatttgaatcctatccttggtgacaccctggctctggagcctcctctagacctctcattggatgtattatgcaaccaaatctcaacaggtactatgtgtttggaaatctttttcccctgtttttgcagaaatatgctaataagagtaatgttaaagatgatgatgttgataatttcaactatttcattcggcaccctttaaatttcaaaaaaatgcacacaaatggatatcctggcaacgagtccaaaatcttagctcaaaatgaattctgctactccagagctttctaactcttccatgtaacaaacatatcccaacattatatggggctgggccagctagttcagagactgatgaggacactttcacttgtctgtcctcatatattaaaatagctccttagttgatatggtttgactgtgtccccacccaaatctcaacttgaattgtacctcccagaattcccacgtgttgtgggagggacccgggggatataattgaaccatgggggccagtctttcccatgctattctcatgatagtgaacaagtctcacgagatctcatgggcttatcaggggtttccacatttgcttcttcctcattttctcttgccgccaccatgtaagatgtgccttttgcttcctgccatgattctgaggcctccccagccatgtggaactgtaagtccaactaaacgtctttttcttccctgtcttgggtatgtctttatcagcagcatgaaaacagactaatacatcagtgcattagatattcctgaaagaacttcagaagcaattaactgcccctggtccagttgcctcctctgataatgcattgtgtgtgtccaactctagtctctaccctatcttctgcccagactgtcttgtactagaaattattctgaagtattggttagaatgtttggaaatgcagcttcctgggaatcttctgaaggactgtcactgtccctcagcccctcctgacttccctttccatccacctgactgcaggtcctaactgatggccatgaactcactacacatctcccttccttccctgcaatttactcagctaacaacacctcagccaggtggtgggtgaccatgaccatcctcctcttccttgccagaattttcatttggttctttttctgatctataaggtcatcttttacagtcagtcattccctcataaccttttttgagtgtatcttttatttcgttgagcataggacactcagttatttcagtctgtctgcttattttcacctctgtggtctttgtggacatttttgtatgtgtgctgcttctcagtcatttgtttgtatttttccttttaaacctgattatttttgacatcatgccagacactatggctgtagaaataatttctggtctaggatggatatatctttctccagagataattttattgtgctttgtaaagtgcatggatgcataaacaatccaggactccctggaacagaattaaaggcttgaggtgtcctggagaccctggaggacaggcttccttctagtgcattgattctattcaagtccctcaatggtcacattaagtaagttatggtctttgcctttacccctctggactgtgagtcagcttccttagtgctgggctgggatcagcaaatgcccataagggcagtgactgctgtgctcactcccgaggcccctgccttctccaagattctggcccagttattcctcatcgtatctttaggatatgaattagttgcagtttgttagtgtggttattttactcaagtacataaataataacaaaagcattaatctgagttccctcttctgtaattatacagattaaggtcaaaacattttatctgaagttttaattttctttgaattttaacgtcagattcttagtctgatttgtttgatatttgacttaaacagcgtagagatgttatacagaaactttaattttaaggaaagaactttttaaaaacttgaagtggatttataatcaaattgggacccttacttggttttgaggttttatcatttgagtatttttatgttatttattacataatctttgatgcttcactggatcataagacaagatgagaacagagagtgaatatttagacttgatcagagagcacaaagtgaacatggaattagtttctgttgatgaacagtccaactatgtaaaatatttaaagacatttattctgagccaaatatgagtgaccatggcctgtgaaacagccttctggaggtactgagatcagtgcccaaggtggtcagggtgcagcttggttttctacattttagggagacatgagacttgagacttcaatcaaacacaattaagagatacattgtttttggccagaaaggcagacacctggaggcaggagtggggagaggttccagcttaaaggtagatataaaatttttctggttgacaattggttgtctctcaggttaaattttaaaagagccctggctgggtaggaagtccattcagattattgggggccttttaattttatttgtggtttacacttcatttctgcattgttgtgatccatttgtgccatgttttttgagtacacctgagggccaggggtcagaactagagggagtcacagatgtgtgactatcatcttttcctacttaagcccaggcttctgggaaaacactttgctccacattttccatttgagggaacttgcctaaagcaatgctccagttttattctttctattgcttgccaaatcttccctatgggaagggaaataagttattttatttagtctcctcttcatctgaggttcctctctcttcattctctccctttcatcctggctactgggaataaaagcagattcttttggtgcttttttaaatgcactaagatcagtgggaaactttcttttccttatagggatggcctgtaatttggaggggagagagaatggattaaattctgattcaagacagtgttggtcggtctttttgccctcccatctgagccgggttgtttatggatattaaaactgatattatgtctccatctgtcagactgtaatgtccatctctcaggtggttccatcttaggtcataatgttgttttatgaccctccaacaccacaaattatggtatctcgtttccccatggctcaataaagggaagtgcaagtccttggtcttgacaaagagcacatttgtgctgttcctgcctactggccaccaggaggcactgtggcttcactgtcatccaaagtctatgggggaggggctgggattgctccctggaggatccttaatgaaaaccctggagttggacctagagtcagggagctgggttggaggtacctgcaatgaaggctgaaaataaagggattagagaccaacccttttgcctcttgatgcggagatgggttttgctgtaaattgagatttgaatagggctctgagtggcagatgggcttgcaagtggatgtaggtctgagctcactgaagacgtggaggcacaaggagctggggtggtgcggcgccgtgttctgggctggggaaagcagaaaagcagtgtttgtgtcacaggagccttgtagagcctggccccaagccggccgaggctagccctacctgttccgtcgaacgtagagggaagaacaggtagaaatggaggcgctaccctggaccatgtcagggggagcctgtcctcaggcagcttcaatcacaatgatgtaccagcagcatatacacttattagcaaggcttagggtggagtaggacagaattttctcccccaagaacctttgctcagggcgggaaaatgctgcagtctagttctaactctattactccagatgcctctgtgtccctggaagaaggtggggtctgggcatataaaagttttgtttgttttgcctgggttgatttcgtttttccatgtgatcgtgcatctgactctaccagtattttgtatccggcttctgcctctctctctcatgagtcccatggctactataaggtattcaatttctattgctgctgtaacgaattaccactaacttggtggcttacaaccacacaagtattaccttacagttctggaggtcagaagtccaaaatggatgttactgggctaaaatccaagcgttggcagggctgcattccttcctgaggctctagggaagaactgtttttctctccttttcagcttctagaggccaccagtgctccttggctcatggccccattcaatcttcaaagccagcaaggactggctgagactttgctcactctgcatactctgatgctcacttttcatcctccctcttccacattttaggaccattgtgattacattgggcccctatattaaggtcagctgattggcaagctcacttcacttggaacattaattcccctttatcaggtaatttaacacattccagggattaggcctgggcatggttgaaggggcattgttctgactaccaaacctaggcacctggtaatagggaggaaaacgtgttggtcaccttaaaaactgattgatgactaccgttttacattctggatctaacacacacaacaaagggatggaacccacaaggaaacagacacctcaggtcacacaagctcatctgtaaactatttgctccttaggatgggcaagtcccctggggcgcaggggactcagctgtatgcctctgtgccaacagcgaaaatgtggccttaaactgctccttcttctttgttagcaaataacctagttgaccaattcatagagcagaggttctctcagttctctatactctacaccccgagaggaagtcagttagtgagatgtaagattcttttataagaaaaagaccaggtgtaaagattaagaaatgctgagctttgctagaggtaagaataagatgtaaatcaactctggaacatttaatttccaaatctttgtgagaaagacaatcttgtttctgatttattgtgtggatagagaatgtgagagattctgtgctctgggctttgcaaactcaatagagttcaaggatcaataaactcggagagacccttcactgcaaagaagagctttgaaatctaatgagctttcgggacactgattcagctcctgtatctttaacaacgcggttgacatgcttgctcttcctgggtaactcagatgctaacttctaactcatttaaaggcatttgaagaactaggagcacagagtcaccagtgagaggaagaggagagtttgcagagaagctggcttgcaataaggcaatgagttcatctttaaatacttggagtttgaggtgcagatggatatagttggcaggctcctaggtaaggcatgttatggagaaggtgctatgaattgataatatcaaagcaaatctacagggatcctctgcaagtgtgcatctgtatctcagatcaattatagttgacttcagtcctgcctgattcatctcccaaaaatgtagtctgcctgattcatctcccaaaaatgtagcctccgcttaaaggagctttcaagttgggggtggtgggccattcagtgttgtcactaacagatgcatcttgtgggggtaaaatgtcccaaagtatcttttcttgcttatgttcataagggcgctggtctggaatgtgccacatctgttctcactctgccatggactcctggaccctctgtgtgtccctttgtatcctggtagcgagtgagtcctcatgtatttatcatcctcatgctgggcctctgtatagatgacttcctgtattttccttattctgtttcctaattttgcgttcttttatagcatgcacagatgctggcattatccagtcacccaagcatgaggtgacagaaatgggacaaacagtgactctgagatgtgagccaatttttggccacaatttccttttctggtacagagataccttcgtgcagggactggaattgctgagttacttccggagctgatctattatagataatgcaggtatgcccacagagcgattctcagctgagaggcctgatggatcattctctactctgaagatccagcctgcagagcagggggactcggccgtgtatgtctgtgcaagtcgcttagccacagcgctgcagaatctccccctccctgtgcagaaactctggtgcttcctcttttcctcacagctcccagcagtcctgagcaaagtctttcctgcctcaccctccccacaagaataattaagtgggtttggggcatggcaaagacataagatgatacaatatcaacatacaaaatcttgtgtaggagataatgtcgaaaatgcattttgcaaatttctcacaaattgtgtatggggtcataactcacacacaggtaggataaaccttaattacccacaccgtaggtttccctgccttcctgtatttgacactcccatccaaacagtgggagctcttcagaatggctatgtcttgtgaactactctgcccacttcattcccttctcactctaagccatgaacagaaatttcccctacaagtactctttattgtaaatgaaagttcttttctatgattgtggacattcctttataatgctaatttcaatttaccatttatatacggatttttacattaaacttaaagagatcttcagtgtggataatacaggcagtttaatacattagaagtaagctacccctcttggcctacagggatccatttgtttctatcttgcataaagcaagccaggtgctagctaaaggtctgtgtgcactcacaggacactgatgagatctcctccactgcctgttctggaactatcaatatgaatatacacagggtgtctaaaagcacacagggcctggtgtggtggctcatgcctgtaatctcagcactttgggaggctgaggcgggaggaatgcttgaggtggggagttcaagactaggctgggaaacagtgagattttgtctctaaaatatatatatattttaaaaattagcctggtatggcagtcttagctactcaggaggctgagttgagagggttgcttgagccctgaagttcgaggctggagtgagccatgatcatcgcaacagagtaagaccccaaatcacacacaaaaaataaataaataaagttaaaaaacatacacaggcctggccagtcttacttggccctctttcctccctgatgctgtgtcctgaacagccaaatctgtattttttttcttctggtttatgatacacatttctacacagcacttgcaatttattatgaagagttataatgtctttcttctatagtagtatttacatactgatgatttctcaacccctatcagtgtatcatcggcaattgttgcaaaatgtgcctgtattttgcatgcccaagacaatttgggtttacccgagttcttcgatagaggccctggtttcgcttgtcactgtcctatttttgttattcaaagactgagactttcaagatcagaatgatgcagaatgaaattcggggtatcctttaatgtacatcgagagacctactctgtgtttatatattgttttggtgtcttccttgctctttgggcttctctctgttgcctccagatcattttccttcctcctttgaagcccagctcctttacacacatgacattagaacagcacccttctttgctgcacttgcttctttcccttcagaactctcttctcattcagtccttctgtctgctactaatcttgtcatcattcctaatggctactcatcacacagaccatttttcattggttttgcttctcactttcttgacttcctcacttttgacattttatccattaatcctaacattgtatatctgacaaggaagatattaaaaatcacatgttttgaatcagtgaatcaataaacaggtttaaagagacaaatgcaaaacaaaattgtccagagctgctgttctgggctggactacagatagatcatgtaagaaataataaaatcatctggtaatttcaatttatctttagaatctttggacagaacagctccaggggagtcaagggatcatagatggtaagagagacaaagaggttaggaggtgagaactggctagggtggcagtccctaacctaaggttttcaaggataatatcaaggtcctcaatttcttttaaatattttttgaaagtgaaaggaaattatgcacatgacccaagctatacataataaggaaattgactcatgtctttgctgagatggaattatattaaagttctgtgaaattaacttatgggctcatctcatgctgattaaaaaccctgattgacagcgctgtgtgttacaaaaatgacaaaataaatgattactttaaaaacattattttaaaaaattagcatttgccaagagtgggggtaaaaaatgacatactgccagatggtacaaggaatggagacgtttgaggcttccagagcctctgacctagctcaccccactttcccgggcccgatgtcttctaaagttcatctgtgcagggaaagggaagtgtagttgtgcaggaaatacggcaggttaggaaatcacaggctctagagcttttacaggcttttacatcctgtgtatctgtgctatttccacagtctgcaacaaactgtattctccccaaacagggccagacactcctcatctatcaaggactgactcacatctaccttcctctttgcttcttaccctgacattccctggccactgcagtatatcattctgtttcctttacattcagaggaaaattcaggtatataattgatactactcgatgtttgtgaaatgaataaattaatgtccatttatacagagctctgaaatattatctattactgttttcccttcaaaaggggctccttttacttgaaatatgatggagagtcattatggctagtctcaattttccatacaatttctgcagtattccaagcaaatgtgttttcccagtcaggattaatgaccagtactacccagtaccctaactatatctaaagctggaattcacaaatgtccttttggaacaaagaaatttatgttataataatatttatccagtcctatgatccagtaaaagaaattcctcaccacaaccacacttttccaaaatcacatctttatgagtctggacacattatcaggggtgcatttcagaagtcaacctaaaacactgagagaaaaatttgttgtgctcagtaatagaatcttatccttgcaataagaagataccatgtgtgtatgtgtgtgtgtgtgagtgtatatgtgtgtatgagtgtgtgtgtgagagtgtatgtgtgagtgtgtatgagtgtgtgtgtatgtgcattttctcatgcagattcatccacatgaaaaagtttatctttggatcgcattacaaagaggcactgggtcacctggggagctcataggcacttctggctagtgatgggaaatgtcacaccactcaatctgcctaagttatagccaatagggttgtttatttcaagactttttataaattcagaattaaatatgtaaaaactagaagccccttttattaaatgcactatttaaaatttggtaataatgactctaaatacaaaatatgaagacacatgagatattaaatatttttccaagatcattctgctggatagcttcacactgtttaattgtatgtcctgtcttattcaggctcctctcttccaccttatcatatgaattgcaatgacataacaacgattaattttgcaatcaaaatgttggttaatacactcttttgtctccactggctaagggaggatttagagattaaccctaaattggcttatctgggaaagcttagagagggtgtatgtgagagggtgggggctgcaggagcgggatgcaggggtctctgttacggatttggacaatctagagctcatcagatcagaaggtgtgaatctgtgagactatggatctatagccacttggaggcgctgtgtctccgcaatgctgctgggaaccctggggaggggagggcaggtgacccagaagaggaaggctgaagagaatgcctggctgcctgctagcatcaggtgggggccatttgagttcagagtgagttctgagtttaacacagactcctcactgtccagagaagggtaggggtgcgaaaggcctcagtttgtaccaacaagagagtgtctctgtgtctgtctggccagtggatggtgaaggggctggggcatccagggcttgggaatcagtgtcagggcagggacagcggtgggtggagtaaggtgtgacatggacatgtggacactgtgctccacctttagtttcgggacccttcagggcaggaatgatacatggggtagcagagccaggcacccacctaagggtacagtgggcaaaggatggcctgcagaggaagtaaatagaaaggcaagtttcctatggtaatgccaaaacattcctgcccccactcagaaaaagaccatgaatgggatgttggcagccagaggggctcaggatctggtgatccgacaggcctttcccaggtaccctctgttgcttctttatgagacctgttttgattctaacagaaatcatgcaaaataagtattatttaactgtgtatacacttgactgaaataactttcctgggtcttgtacactcttagatggaagaaaccagacctggcgttggatagatcagtaatagggtgactgtagttaacatcaaccaattatgcatttcaaaatagctagaagagaataattcaaatgttcttaaggtaaagaaaagacaaatattaaagtgatgcctatcccaatgaccatgatttgattatattaatgtatcaaagatcacatctactaaaaaatatgtacatctaatatgtatcaataaatagttaattgaaaagaagataactagctgacgtctgttcctccagcacctctacctgctgtccccactctgcagatttgtcctctcacatggccttccctttccaggtccccattagcaggaggagaaagtcaggcattatatgtgatcactatactctctttgctgaaaagtccaaggaacatataacttccaggctaaacatattcattcatccttcattgtgacaaaaaagagaggtgcaattttctgcaccatagctgtcctatgaatgaggccaggtgatctctttcatgaaggatatgtgaggagagagatttctcagtgcacagcaaagggaatgggatgtttttaaaggaaagtgtagttttcctgtacctgatgtaatttattatgagggaaaagacacaaatcattattattcattagttaatttattgatttcataaacattttaagccccctgctttgtacaagggattgtgccacataaatttaaaagcgaaacaaaaaataaaatttagaaaaacagataagacaatttttaaaaacagtatgtttctcgcctttgacaatattaaggcaattaatatggaaatgtatttattgaattattttgaaatttatattttgctaattcaaaatactttaatgtttctgaattatacaaatgtcctttttaaaaatctttctctttagttacctacctccttttaccacctttttaaaaaaaattttagtgagaacatttaatatgagatctatcctcttaacaggcttttaagtatatagtagagtatcgtagtccacagacacaaggctgtacagtagatctctagaacttcctcatcctgcttaactgggaattttatacctgttgacagcaactccccattgccaccaatccctagcccttggaaaccaatgtttcagtttttacttccatgagtttgactatttaggttgcctcataaaagtagaaaaaggcacggtggctcacgcctgtaatcccagtactttgggaggccgaggtgggcacatcacgtgaggtcaggagttggagaccagcctggccaacatggtgaaaccctgcatctactaaaaatacaaaaattagctgggcacggtggcaggcgcctgtaatcccagctactcaggaggctgaggcaggaaaatcatttgaaaacgggaggtggaggttgcagcgagccgatattgtgccattgcactccagcctggtcaacaaggcgaaactccatctcaaaaaaaaaaaaaaaaaaaaaaaaagagtcgtgcagtatttgtctttctgtgtctggcttactcagttaccataatgtcctccaggtttatccacattgccacatatggtgagattttcttcttttttgatattatttccttgtgtgtatataacacatttaaggtctgtggtaataaatgcatagtatttgactgtttctataaaaccacacatcacacgagtaacagggtcatttgcagaggtgcaggctctgagtacattaatgcacctttatggttcaattatgctgcacggagaagattcagaaaaaaaaatcataattccatcctttattgtcattttactatacacaaaatagaagcccttcatttgcaaaattgcagttaattagaaattcaactgtcagaaaaagccttaagacacaaatgctattctcattttacagagaggagggaattgacccacaggttaaataacatgatcacattaaatggctattaggatgcagtaccgggggtccagctctgacctgtcagtctctaagccctgtgtttatagctctgtgctataaggcattttcatgaagagagacgcctacctttcaaaatcagagtatttgctctctacatccctttcagacctgctggctccaataacatcacagacagagatgaatgtatcctggagacagtatggggaaagaactctgaaaagatgccatggcacccagccctgactcccactctaacaccaccacatcactaactgagaccagctcttgacaggttaactttagtttggtttttgttttgttaatctataaaatgagactaatacagtctatctatagggctgtatatagaatttagtatcataaaatatctagcctataataggaatctaaatctcttgattccctttgttaatctcagacagcctcttccaccctcaccatgcacaaaggcagattcagacacactctgcctagaaatcttaagctgagaacttagaagtcacagaagtggaaatatatatacctgatgatccctcacatgaaattaactaaagaatgtagcatacatacctcctcagatagttaaaaatcaacttcattaatatatagattatataaacattacacattttaagtgaactgatgagtgattttggagcaatatatgtgtatagacccttcaatccccatccctattaagatgccgaacatttccatcacacagagagtgttctcattcctctctgcaatgcctccctccatccctgacaaccagtgatatttatcactagaaaattgttttgctcaggtacatttttaatggaaatttacaacctctaactattaaaacacttcctctttagtacacaggtaaatattcaagagagggaggtgctcccaaagatatttatggctattcccctcaatgacagaatggataaagaaaatgtgacacatatacaccatggaatactatgcagtcatatgaaagaatgagatcatgtcctttgcagggacatggatgaagctggaagccattatcctcagcaaactaatacaggaacagaaaaccaaacaccgcatgttttcacctagtgggagttgaacgaagagaacacatggacacagggaggggaacaacacacactggagcctgtcggagggcggagggtgagaggagggagagcattacgatgaatacctaatgcatgcggagcttaaagcctagatgacgggttgatgggtgcagcaaaccaccgtggcacatgtttacctatgtaacaaacctgcacattcttcacatgtatcccgaaacttaaagtaaaatttaaaaaatttaaaaaaagagagattttttatggctttagaagggtttcaaacccttccagaaccctgagagacacctgatccacgttagggataatcctgtctggagatagacaagatgatgaaatgacaccaaaaatcttcccacatggaagaggctatttccacataatttgttcattcattttcattattttttctcatacactcattcacttaaattattttataatgatattctgacaaaaactaatcatctccaagaacattattttgagtttccatcagacaatatttagctgtgattcagctctgcttcctgagcacatagagtgcactggggccaagtgaaccatgtgcaatagtgactaccttgagagataatgtcacattgagagaaggggtctctcttccttgaccgcaagtgtccaacccataaaacatgagccttgagctagaaaattcccctttctgttctggcgctgcctgggcaccaggctcttttgctgtgtgtccctctgttttctggaccagagaaatactgggcacatatgtggcatctactcattggtttgttggaccctagcttgcagataatagtaccaggtgttcctttgctgtgactttaacttctgtgttcttcacaggacacagtcccattgatgggatccaaagtaccattgatactgagtgacccagaccctggtcatgtacttgtgctaaaaaggaaaacagcacatggggaggtgagcagaatatgaaacacaattatggactcagaaacagccatacaacttattagcatcccgttgtttcaaaaaatcataagaatttgaagaacatgacaatgttatactgactgtggcgtcctaataagtgtgggactctgtgcaccaagatatgttatttgaattcctttttattgattactaaattaatggcaggaatcccacacaaagggatactccctatgaaacatgacaactcaaattaaaaaagagcactcttccttactctaaagtctgccctctctccccgagtccctcacgcataaggccacatttgtgcccctaggtcatgggcagcgctggttggccaccatcgtccacatgtagaaggcagtcagcaacgtgaagtggttctgcctactgcagtctcaccccagacatggaaagcaagagccctgggtggagctgaaggtgctcagctgggtttgtcagaagtctcatctgtcagtgagttgacaagaaacagagcaaaacgactcctccaatgttgacgagcctgcccctgggatttggaaacttcataacagaaaaaaccaatatagacaaaggattttaaacaggattaaggtcaattaagcaaattagaaaaggacacttgaaggagtatttgggacaggggaatcaaaagcaccaggaagacatgaggagtttccctaagactctagactacagcactagcactatgtagataactaacactaaaatattaattatatcattgaaaaaataaaatttacagtgaattacaaactgtttccaaaaggtcatgaaaatcttgtagacttgtttcaattcagacagatgtgttcttctcattctcagctgttcactggtgcatttattttggatttgaccatctggggaatgggtgtggcctctcctggcctctccctccctggggcccaggcagggagaatgtctcagaatgacttccttgagagtcctgctcccctttcatcaatgcacagatacagaagacccctccgtcatgcagcatctgccatgagcatcggcctcctgtgctgtgcagccttgtctctcctgtgggcaggtgggtcctgggcagagccccttgtgtgaatttcaaggcccagcgccttcccattggggctgcagcatcagctttgttctccttctctgcaggtccagtgaatgctggtgtcactcagaccccaaaattccaggtcctgaagacaggacagagcatgacactgcagtgtgcccaggatatgaaccatgaatacatgtcctggtatcgacaagacccaggcatggggctgaggctgattcattactcagttggtgctggtatcactgaccaaggagaagtccccaatggctacaatgtctccagatcaaccacagaggatttcccgctcaggctgctgtcggctgctccctcccagacatctgtgtacttctgtgccagcagttactccacagcgctacaaggccgtctcctctctgcacataaaggcagggaggttctgccctcctcccccacccaagactcagggatgccctgggcagagatctctgcgccaggaaccttggaacccacagtggccccaagtggcctggacagtatgagccttgctctgtgccaggtgcctctgcaggcatctcagccaggcctggactggtcccaggtcctcagatgtctcctttgttgctttctctggtctatccttggagctttccttttggggtggggccagggctttcccagctcctacttttctactcattatcctgagtccgaggcccccaggataaaacaggatttgcatttcagatccatctagactcccgtctctccctggtgaccctgttgcttcctctctctaatgtttcccccagcccccaccctcatgttttctctcctgtggcccacctttcccatctgggcagtcaccctccaaggcgttgctgggtctctcctccccccacctcctcgcccctctctactgcagccatgaggggagcccctgttctgtgcctccttccttcccatcacagagacttcaaaggccatttcctctgcccttgcatggagccttcctttctgcagtagccagctcctacctgtccttcatatctcagcatgatcaacccctcttgtgggaagcgctccctcccctcccatctgaaatcaactttcctctcataagctgtcacagattcatgtgtctgttagtaacctttagcacagcttggctttctcagatacttgtctggttatttttgtactccacccaatttttaagcccatgagagctaaggctgtgcctgctgcatttaccaacattggtgtctggcatgtagggagacccatttcacaaagaatggatgagtgaatgacaggctgagtgagtgatgagtgggtggataaaccaataataaaaacacactacatctactgtaacctggcagagatc

SEQ ID NO: 428 - DNA, 1637 bp, Homo sapiens
ctacatactatgatcaagtatattgcatcctaacgctacctctgactcaacctgactttgtaggaaagcctacacgtagccttgtttgataaaaacacggaagtgactagagaatggaagataaaggaagaagctaggaagtccttgctatcaaaaccttatcctaatataggaccaattgaagtattcaaaaagaaaaacagtatcttatatgattagtttttgttggtggttttgttttcatttatttttgcaagagccactttttatttactttctctagggataagagataaaacttgaagtacttttttcaaatcttgtgtgcaaattagtattgttagcatctatttggcttattttagtatttttaagtctagtcacaaaccaaacaaaacttttgaaaatgagctatattttgttcaaagataattgatttgatcttatatttatttgtttttaggataatttttgatctttttgtaaactgctttgcttgttaatatctgtgaaaaataaatgagttcattttgttcactttccaattttcccgagtatcctagtcatcaaagataacagttcatcagaattacagtcagaaaatcctttttctactgaatagttagcagggaaaaataattctgatatttaactgtcataattctgtagtgctattatagtgaaaaactcagttctataagctagctgtgttgtcacagttttatcatagttcataattatttcatgtgcaatcctatttggaggccctgttagacttttaacaatcccatccatatctgtaattctctgatggcaagaatggatggagcatttctgagttaacagtgctggacagtatcgtactgggtgtcataaactctttatgaatggtaatattatgtaaattgaaatctggccctcaaactatattgcagctttcagcagtatgtttgaaggcctcttttgttaatgattctgtaatgtatgaattatgttcttgagtggttaaaaaagaatatgaaggcttgataattatttattgggtaaagtcaggaaattgtagtgaaagaactaatggttttgttttttggaataaaggcacctaagctattgctaattgaattgctgctagaattagaaattatgctttagaatagaattggtatttctgtgattctttttgcttcttggtattttctcttgtatctatgtatctagtattgaggcttgctctttcatgtggctttatcctctctttaatagctgttgtaaaattcctgagtaactggctgcttcaggatcagcttgcagagtcttgcttttaggttagatacaaacaaagtaaatcatagttggtgtaaatccagcaaaaaacagctggctttggaatggagaacactacaattcaaatttgaagtatattcagaagaaaactttggaattagctttacatttgtttgtaaatctaaacaaatatgcaaaattggtcaaaatgtaagtatatagcatttttaaagattaatggttccttttatgtgctgatttctttgtattctgttctctgcattcatcattcaggaataccaccaataaatgtatttatatatcccttaaaaaaaaaaaaaaaaaaaaaaaaa

SEQ ID NO: 429 - DNA, 2424 bp, Homo sapiens
cctggaactctagcacgccgagtgaacttgaatctttggctatttaaggaggactgggtttgttgtgaagttgcggtgatccagcgcagagccccgtcctgattgatcgcatcgcggggctcagatgactgtaaaatgaatagatgaaattcttgcttctcgaagattttcttgggcatctcccggaaagtgcgttttaaggcgaagtcatgatgtattctcccatctgtctcactcaggatgaatttcacccattcatggaagcacttcttccacatgtccgtgcaattgcctatacttggttcaacctgcaggctcgaaaacgcaagtactttaaaaagcatgagaagcgaatgtcaaaggatgaagaaagagcagtcaaagatgagcttctcagtgaaaagcctgaaatcaaacagaagtgggcatccaggctccttgccaaactgcgcaaagatattcgccaggagtatcgagaggactttgtgctcaccgtgactggcaagaagcacccgtgctgtgtcttatccaatcccgaccagaagggtaagattaggagaatcgactgcctgcgacaggcagacaaagtctggcgtctggatctagtcatggtgatcctgttcaaaggcatccccttggaaagtaccgatggagagcggctcatgaaatccccacattgcacaaacccagcactttgtgtccagccacatcatatcacagtatcagttaaggagcttgatttgtttttggcatactacgtgcaggagcaagattctggacaatcaggaagtccaagccacaatgatcctgccaagaatcctccaggttaccttgaggatagttttgtaaaatctggagtcttcaatgtatcagaacttgtaagagtatccagaacgcccataacccagggaactggagtcaacttcccaattggagaaatcccaagccaaccatactatcatgacatgaactcgggggtcaatcttcagaggtctctgtcttctccaccaagcagcaaaagacccaaaactatatccatagaygaaaatatggaaccaagtcctacaggagacttttacccctctccaagttcaccagctgctggaagtcgaacatggcacgaaagagatcaagatatgtcttctccgactactatgaagaagcctgaaaagccattgttcagctctgcatctccacaggattcttccccaagactgagcactttcccccagcaccaccatcccggaatacctggagttgcacacagtgtcatctcaactcgaactccacctccaccttcaccgttgccatttccaacacaagctatccttcctccagccccatcgagctacttttctcatccaacaatcagatatcctccccacctgaatcctcaggatactctgaagaactatgtaccttcttatgacccatccagtccacaaaccagccagtcctggtacctgggctagcttggttcctttccaagtgtcaaataggacacccatcttaccggccaatgtccaaaattacggtttgaacataattggagaacctttccttcaagcagaaacaagcaactgagggaaaaagaaacacaacaatagtttaagaaattttttttttaaataaaaaaaaggaaaagaggaagactggacaaaacaacacaaaggcagaaaggaaagaaactgaagaaagaagataatagaccagcaattgcagcacttacaatcactaattcccttaaggttaaactgtaatgacataaaaagggtcgatgatatttcactgatggtagatcgcagcccctgcaacgtagcctttgttacatgaagtccgctgggaaatagatgttctgtctctatgacaatatattttaactgactttctagatgccttaatatttgcatgataagctagttttattggtttagtattcttgttgtttacgcatggaatcactattcctggttatctcaccaacgaaggctaggaggcggcgtcagagatgctgggtgacagagccatgagccagccattttataagcactctgatttctaaaagttaaaaaaaatatatgaaatctctgtagcctttagttatcagtacagatttattaaatttcggcccttaacccagccttttccagtgtgtaacccagtttgaaatcttaaaaaaagaaaaaatgaaaaaaaaaggaaaaaaagaaaaaaggaaaaaaacagtttgaacacaaaggctctatggaagaaatgcctctatgtaggtgaagtgttctctctgcatgcaacagtaaaaattaatataatattttccccacaaaagaaacacttaacagagggcaagtgcaatttattaaatttatattcttaaagggggaattcatggattattaaggtccttcaggcccttggggactctta

SEQ ID NO: 430 - DNA, 934 bp, Homo sapiens
gagcgagcgcgctgcagcgcgcgcatggctagcacggcttcggagatcatcgccttcatggtctccatctcaggctgggtactggtgtcctccacgctgcccaccgactactggaaggtgtctaccatcgacggcacggtcatcacaaccgccacctattgggccaacctgtggaaggcgtgcgttaccgactccacgggcgtctccaactgcaaggacttcccctccatgctggcgctggacggttatatacaggcatgtagaggacttatgatcgctgctgtcagcctgggcttctttggttccatatttgcgctctttggaatgaagtgtaccaaagtcggaggctccgataaagccaaagctaaaattgcttgtttggctgggattgtattcatactgtcagggctgtgctcaatgactggatgttccctatatgcaaacaaaatcacaacggaattctttgatcctctctttgttgagcaaaagtatgaattaggagccgctctgtttattggatgggcaggagcctcactgtgcataattggtggtgtcatattttgcttttcaatatctgacaacaacaaaacacccagatacacatacaacggggccacatctgtcatgtcttctcggacaaagtatcatggtggagaagattttaaaacaacaaacccttcaaaacagtttgataaaaatgcttatgtctaaaagagctcgctggcaagctgcctcttgagtttgttataaaagcgaactgttcacaaaatgatcccatcaaggccctcccataattaacactcaaaactatttttaaaatatgcatttgaagcatctgttgattgtatggatgtaagtgttcttacatagttagttatatactaatcattttctgttgtggctttctataaaaaataaacagtttatttacagg

SEQ ID NO: 431 - DNA, 1516 bp, Homo sapiens
tgaaagaacaactcttgcacctctcagagaagataactgcctcttgtacttggatgcgtagtacatcatatgtatacaatcagataaaagcatagaagtaaatcattcggatgtgatttttatttggttttcatggaaagttaaagtgataaagtatattgaatagttctttgacagaatttgtttaaactatgaaactacacacttaaaaatctaagatgtggattattgttagaatctgcaacttcattggcaaattatttcaagtatttttctataatcactttccccttctaaataaataaacttcgagaataacccatcataatccaaacaaatgatgcctcaacattttgagctgctctgtcggacaaataaacctggtcctcttgaggttatattttggatatacatttttaaactgtcagtaattattgtcagatgtggagttcaatagccagccagtgttcatttttatccttgagcttttagtaaaaacttcctggttttatttttagtcattgggtcatacagcactaaagtctgctatttatggaaactaacttttttgtttttaatccaggccaacatgtatgtaaattaaatttttagataattgattatctctttgtactacttgagatttgattatgagatgtgcatattgctttgggaagagctcgaggaaggaaataattctctcctttgttttgaacctcaaactagataaaccctaggaattgcttaactgcaacaagtaattttcattcccacaaaaacctgaggcagctcttttgcccagagcgttccctgtagccacccccaccccacttgcccttggttctttagaaggagcacacacatcccttgattcctccctgatgtggtaaactggcacactccaggggtctaaaacataaaacagttgtgtttagggaaccttaagtcatgcagacatgactgttctctttgtacaagtgtgaatcaaaatatgtatctctttttcagagtctggttaagctatgtcattgtctactgcatagtttcctgagtctgtttgtaaagtgcttatggctaacagttcagttctgtatttgttgacaggtaaataagtggagttgagtgccatctttgaaaaaattaccctctagctctaacactgaaaataataataaattgtagatctctgcaactaagtttaaagcagtgtgactgtgttgcttaaatatcaagtattgtttataaccaccaaaaaaaaaaaaagccctggtagttttttggcaccttatgtttaaatcagattcttagatttggagtagacctgaccttgttatttattagataacattttgaatgtatccattggatttctaaaatgtattgtgaatttctcagacaaacaggatttatgctggagctctgttttgcttagaaataaaatatttagtagtttatttctgctctaattaaaatgtcaagaatgccaaaaaaaaaaaaaaaaaaaaaaaaaaaaaaa

SEQ ID NO: 432 - DNA, 5421 bp, Homo sapiens
ccgggatccggttttttttgtttttaaaagtgtaatttcctttttatttgcatctgtttatgactgaaaaaaatgactagttattatgaagacactactgttgaagatggatattttaacatggagtttcaacaaaattacttcttgagacagagctgatgtgttttttaaataacgtgattttaagcatatatttgaacaaaactaaaacatttagtattatgaatatgaaaaaagatcagtaaatcaatgtactcttctaggctgaattaaggtagactatttaaggtttcaaaaaagtttggctggggcagaataagttttacaaaacccatgccatccaaaattaagatgacatgtagcagcaagaagtattccaatgtctcataaccagttctcgcaagcaatgtgtattccttactttaaggaagtgtcaaacaaatagaaaaatctggaagaatttactaagtgtaataaattagaggtaaatcgtaataaaagaatttatgtctcacaaaaatattcacaagtgggagttttcttttaccaacttctcagagtccttctagccccctcttcacttctgaaagatgggatttaccaaaatctggtttacatttaacttttcagggacacatgacctgaaaagaaagatgtcagataatactgacattgcctcatgcactttctttgtatcagtccttcttctgtaagtaatcagaattgggtccaaatggcatagaatcaaacattatgtatcatgccaaataccacttcctgcccaacaaaatttcatctttctccagtaatgaagaggtggacattcttgttggactgtagcatctgtgccgcccgctccacaccaaccacggcagctaacctctgggcatcatatttggagtagagaacagtgcaggtccacgtggcctcttctcctctgttggtggctctcagcatattacagatttcactgtaaaagtgtggatatgtcggcagttcatagaaaatcaggttcctgatgccttttattgctgtagtttatttccacccccttccctcctgttttctctctctccttctctctctctctctctctctcttttttttccgccctagctggggctgtgttggaggagaggaagaaagagagacagaggattgcattcatccgttacgttcttgaaatttcctaatagcaagaccagcgaagcggttgcacccttttcaatcttgcaaaggaaaaaaacaaaacaaaacaaaaaaaacccaagtccccttcccggcagtttttgccttaaagctgccctcttgaaattaattttttcccaggagagagatgtcttatcaggggaagaaaaatattccacgcatcacgagcgatcgtcttctgatcaaaggaggtaaaattgttaatgatgaccagtcgttctatgcagacatatacatggaagatgggttgatcaagcaaataggagaaaatctgattgtgccaggaggagtgaagaccatcgaggcccactcccggatggtgatccccggaggaattgacgtccacactcgtttccagatgcctgatcagggaatgacgtctgctgatgatttcttccaaggaaccaaggcggccctggctgggggaaccactatgatcattgaccacgttgttcctgagcctgggacaagcctgctcgctgcctttgaccagtggagggaatgggccgacagcaagtcctgctgtgactactctctgcatgtggacatcagcgagtggcataagggcatccaggaggagatggaagcgcttgtgaaggatcacggggtaaattccttcctcgtgtacatggctttcaaagatcgcttccagctaacggattgccagatttatgaagtactgagtgtgatccgggatattggcgccatagcccaagtccacgcagaaaatggcgacatcattgcagaggagcagcagaggatcctggatctgggcatcacgggccccgagggacatgtgctgagccgacctgaggaggtcgaggccgaagccgtgaatcgtgccatcaccatcgccaaccagaccaactgcccgctgtatatcaccaaggtgatgagcaaaagctctgctgaggtcatcgcccaggcacggaagaagggaactgtggtgtatggcgagcccatcactgccagcttgggaacggacggctcccattactggagcaagaactgggccaaggctgctgcctttgtcacctccccacccttgagccctgatccaaccactccagactttctcaactccttgctgtcctgtggagacctccaggtcacgggcagtgcccattgcacgtttaacactgcccagaaggctgtaggaaaggacaacttcaccctgattccggagggcaccaatggcactgaggagcggatgtccgtcatctgggacaaggctgtggtcactgggaagatggatgagaaccagtttgtggctgtgaccagcaccaatgcagccaaagtcttcaacctttacccccggaaaggccgcattgctgtgggatccgatgccgacctggtcatctgggaccccgacagcgttaaaaccatctctgccaagacacacaacagctctctcgagtacaacatctttgaaggcatggagtgccgcggctccccactggtggtcatcagccaggggaagattgtcctggaggacggcaccctgcatgtcaccgaaggctctggacgctacattccccggaagcccttccctgattttgtttacaagcgtatcaaggcaaggagcaggctggctgagctgagaggggttcctcgtggcctgtatgacggacctgtgtgtgaagtgtctgtgacgcccaagacagtcactccagcctcctcggccaagacgtctcctgccaagcagcaggccccacctgtccggaacctgcaccagtctggattcagtttgtctggtgctcagattgatgacaacattccccgccgcaccacccagcgtatcgtggcgccccccggtggccgtgccaacatcaccagcctgggctagagctcctgggctgtgcgtccactggggactggggatgggacacctgaggacattctgagacttctttcttccttccttttttttttttgtttttttttttaagagcctgtgatagttactgtggagcagccagttcatggggtcccccttgggcccacaccccgtctctcaccaagagttactgattttgctcatccacttccctacacatctatgggtatcacacccaagactacccaccaagctcatacagggaaccacacccaacacttagacatgcgaacaagcagcccccagcgagggtctccttcgccttcaacctcctagtgtctgttagcattccttttcatggggggagggaagataaagtgaattgcccagagctgcctttttcttttctttttaaaaattttaagaagttttccttgtggggctggggaggggccggggtcagggagagtctttttttttttttttttaaatactaaattggaacatttaattccatattaatacaaggggtttgaactggacatcctaatgatgcaattacgtcatcacccagctgattccgggtggttggcaaactcatcgtgtctgtcctgagaggctccacaatgcccacccgcatcgccattctgtagtcttcagggtcagctgttgataaaggggcaggcttgcgttattggcctagattttgctgcagattaaatcctttgaggattctcttctcttttaccatttttctgcgtgctctcactctctctttctctctctagctttttaattcatgaatattttcgtgtctgtctctctctctctctgtgtttcctccagcccttgtctcggagacggtgttttcctcccttgccccattatcttttcacctcccaggtctacatttcatggtggtcgttgggtccgcctaaaggatttgagcgtttgccattgcaagcatagtgctgtgtcatcctggtccatgtaggactggtgctaaccacctgccatcatgaggatgtgtgctagagtgtgggaccctggccaagtgcaggaatgggccatgccgtctcacccacagtatcacacgtggaaccgcagacagggcccagaagctttagaggtatgaggctgcagaaccggagagattttcctctgtgcagtgctctctggctaaagtcacggtcaaacctaaacaccgagcctcattaacccaagtgaaccaaccaaagtcaccagttcagaagtgctaagctaataggagtctgacccgagggcctgctgcttcctggttaagtatcttttgagattctagaacacatgggagctttttattttcggggaaaaaccgtatttttttcttgtccaattatttctaaagacacactacatagaaagaggccctataaactcaaaaagtcattgggaaacttaaagtctattctactttgccaagaggagaaatgtgttttatgaacgatagatcacatcagaactcctgtggggaggaaaccttataaattaaacacatggcccccttagagaccacaggcgatgtctgtctccatccttccctctccttttctgtcacctttccccctagctggctcctttggacctacccctgtccttgctgacttgtgttgcattgtattccaaacgtgtttacaggttctcttaagcaatgttgtatttgcaggcttttctgaataccaaatctgctttttgtaaagcgtaaaaacatcacaaagtaggtcattccatcaccacccttgtctctctacacattttgcctttggggatctggttggggttttgggttttttgttgttgttgtttatttgttattttaaaggtaaattgcacttttaaaaaaataattggttgacttaatatatttgctttttttctcacctgcacttagaggaaatttgaacaagttggaaaaaaacaatttttgtttcaattctaagaaacacttgcagctctagtattcacttgagtcttcctgtttttcctgtaccgggtcatggtaatttttggttgttttggttgttttcttaaaaaacaagttaaaacctgacgatttctgcagtgacttgatgctctaaaacagtgtaggatttaagaatagatggtttttaatcctggaaattgtgattgtgacccatgagtggaggaactttcagttctaaagctgataaagtgtgtagccagaagagtactttttttttgtaaccactgtcttgatggcaaaataattatggtaaaaaacaagtctcgtgtttattattccttaagaactctgtgttatattaccatggaacgcctaataaagcaaaatgtggttgtttcaaaaaaaaaaaaaa

SEQ ID NO: 433 - DNA, 3565 bp, Homo sapiens
gcagccgggcggccgcagaagcgcccaggcccgcgcgccacccctctggcgccaccgtggttgagcccgtgacgtttacactcattcataaaacgcttgttataaaagcagtggctgcggcgcctcgtactccaaccgcatctgcagcgagcaactgagaagccaagactgagccggcggccgcggcgcagcgaacgagcagtgaccgtgctcctacccagctctgcttcacagcgcccacctgtctccgcccctcggcccctcgcccggctttgcctaaccgccacgatgatgttctcgggcttcaacgcagactacgaggcgtcatcctcccgctgcagcagcgcgtccccggccggggatagcctctcttactaccactcacccgcagactccttctccagcatgggctcgcctgtcaacgcgcaggtaaggctggcttcccgtcgccgcggggccgggggcttggggtcgcggaggaggagacaccgggcgggacgctccagtagatgagtagggggctcccttgtgcctggagggaggctgccgtggccggagcggtgccggctcgggggctcgggacttgctctgagcgcacgcacgcttgccatagtaagaattggttcccccttcgggaggcaggttcgttctgagcaacctctggtctgcactccaggacggatctctgacattagctggagcagacgtgtcccaagcacaaactcgctaactagagcctggcttcttcggggaggtggcagaaagcggcaatcccccctcccccggcagcctggagcacggaggagggatgagggaggagggtgcagcgggcgggtgtgtaaggcagtttcattgataaaaagcgagttcattctggagactccggagcggcgcctgcgtcagcgcagacgtcagggatatttataacaaaccccctttcaagcaagtgatgctgaagggataacgggaacgcagcggcaggatggaagagacaggcactgcgctgcggaatgcctgggaggaaaagggggagacctttcatccaggatgagggacatttaagatgaaatgtccgtggcaggatcgtttctcttcactgctgcatgcggcactgggaactcgccccacctgtgtccggaacctgctcgctcacgtcggctttccccttctgttttgttctaggacttctgcacggacctggccgtctccagtgccaacttcattcccacggtcactgccatctcgaccagtccggacctgcagtggctggtgcagcccgccctcgtctcctctgtggccccatcgcagaccagagcccctcaccctttcggagtccccgccccctccgctggggcttactccagggctggcgttgtgaagaccatgacaggaggccgagcgcagagcattggcaggaggggcaaggtggaacaggtgaggaactctagcgtactcttcctgggaatgtgggggctgggtgggaagcagccccggagatgcaggagcccagtacagaggatgaagccactgatggggctggctgcacatccgtaactgggagccctggctccaagcccattccatcccaactcagactctgagtctcaccctaagaagtactctcatagtttcttccctaagtttcttaccgcatgctttcagactgggctcttctttgttctcttgctgaggatcttattttaaatgcaagtcacacctattctgcaactgcaggtcagaaatggtttcacagtggggtgccaggaagcagggaagctgcaggagccagttctactggggtgggtgaatggaggtgatggcagacacttttactgaatgtcggtctttttttgtgattattctagttatctccagaagaagaagagaaaaggagaatccgaagggaaaggaataagatggctgcagccaaatgccgcaaccggaggagggagctgactgatacactccaagcggtaggtactctgtgggttgctcctttttaaaacttaagggaaagttggagattgagcataagggcccttgagtaagactgtgtcttatgctttcctttatccctctgtatacaggagacagaccaactagaagatgagaagtctgctttgcagaccgagattgccaacctgctgaaggagaaggaaaaactagagttcatcctggcagctcaccgacctgcctgcaagatccctgatgacctgggcttcccagaagagatgtctgtggcttcccttgatctgactgggggcctgccagaggttgccaccccggagtctgaggaggccttcaccctgcctctcctcaatgaccctgagcccaagccctcagtggaacctgtcaagagcatcagcagcatggagctgaagaccgagccctttgatgacttcctgttcccagcatcatccaggcccagtggctctgagacagcccgctccgtgccagacatggacctatctgggtccttctatgcagcagactgggagcctctgcacagtggctccctggggatggggcccatggccacagagctggagcccctgtgcactccggtggtcacctgtactcccagctgcactgcttacacgtcttccttcgtcttcacctaccccgaggctgactccttccccagctgtgcagctgcccaccgcaagggcagcagcagcaatgagccttcctctgactcgctcagctcacccacgctgctggccctgtgagggggcagggaaggggaggcagccggcacccacaagtgccactgcccgagctggtgcattacagagaggagaaacacatcttccctagagggttcctgtagacctagggaggaccttatctgtgcgtgaaacacaccaggctgtgggcctcaaggacttgaaagcatccatgtgtggactcaagtccttacctcttccggagatgtagcaaaacgcatggagtgtgtattgttcccagtgacacttcagagagctggtagttagtagcatgttgagccaggcctgggtctgtgtctcttttctctttctccttagtcttctcatagcattaactaatctattgggttcattattggaattaacctggtgctggatattttcaaattgtatctagtgcagctgattttaacaataactactgtgttcctggcaatagtgtgttctgattagaaatgaccaatattatactaagaaaagatacgactttattttctggtagatagaaataaatagctatatccatgtactgtagtttttcttcaacatcaatgttcattgtaatgttactgatcatgcattgttgaggtggtctgaatgttctgacattaacagttttccatgaaaacgttttattgtgtttttaatttatttattaagatggattctcagatatttatatttttattttatttttttctaccttgaggtcttttgacatgtggaaagtgaatttgaatgaaaaatttaagcattgtttgcttattgttccaagacattgtcaataaaagcatttaagttgaatgcgaccaaccttgtgctcttttcattctggaagt

SEQ ID NO: 434 - DNA, 882 bp, Homo sapiens; identical to SEQ ID NO: 130

SEQ ID NO: 435 - DNA, 1558 bp, Homo sapiens; identical to SEQ ID NO: 131

SEQ ID NO: 436 - DNA, 2363 bp, Homo sapiens
tcgagcccgctttccagggaccctacctgagggcccacaggtgaggcagcctggcctagcaggccccacgccaccgcctctgcctccaggccgcccgctgctgcggggccaccatgctcctgcccaggcctggagactgacccgaccccggcactacctcgaggctccgcccccacctgctggaccccagggtaaggacaagggcccccagactcacagttccagccctgaggacaggggttccctcatccccccacccagcctaatgcccacctcctaatagaggggttcctggggacctgaagagggggcactatgacgtctccccaagcacctaggtgttctgtcctgctcttccttcagactcagccgttggaccccagtcctttcctccccagacccaggagttccagccctcaggcccctcctccctcatactagggagtcctggcccccaaattcctcctttcccaagacttatgatttcaggtcctcagctgtctcctccctcaaaccgggatcctcagtcccctgctccaccaggctcaggcatgggggtccccatccctgcaaatccaggcgtccccccgctgctggtcagacactgaccccatccttgaacccagcccaatctgcgtccgtgatcacggcgtgctctggccaaggcccagtccctacagcctgcctggatggacgcctgggactgggggcgccaggactgggctgggctgggctcccccaggccctgcctccccgtccatctcctcacaggtcccaccctggcccaggaggtcagccagggaatcattaacaagaggcagtgacatggcgcagaaggagggtggccggactgtgccatgctgctccagacccaaggtggcagctctcactgcggggaccctgctacttctgacagccatcggggcggcatcctgggccattgtggctgttctcctcaggagtgaccaggagccgctgtacccagtgcaggtcagctctgcggacgctcggctcatggtctttgacaagacggaagggacgtggcggctgctgtgctcctcgcgctccaacgccagggtagccggactcagctgcgaggagatgggcttcctcagggcactgacccactccgagctggacgtgcgaacggcgggcgccaatggcacgtcgggcttcttctgtgtggacgaggggaggctgccccacacccagaggctgctggaggtcatctccgtgtgtgattgccccagaggccgtttcttggccgccatctgccaagactgtggccgcaggaagctgcccgtggaccgcatcgtgggaggccgggacaccagcttgggccggtggccgtggcaagtcagccttcgctatgatggagcacacctctgtgggggatccctgctctccggggactgggtgctgacagccgcccactgcttcccggagcggaaccgggtcctgtcccgatggcgagtgtttgccggtgccgtggcccaggcctctccccacggtctgcagctgggggtgcaggctgtggtctaccacgggggctatcttccctttcgggaccccaacagcgaggagaacagcaacgatattgccctggtccacctctccagtcccctgcccctcacagaatacatccagcctgtgtgcctcccagctgccggccaggccctggtggatggcaagatctgtaccgtgacgggctggggcaacacgcagtactatggccaacaggccggggtactccaggaggctcgagtccccataatcagcaatgatgtctgcaatggcgctgacttctatggaaaccagatcaagcccaagatgttctgtgctggctaccccgagggtggcattgatgcctgccagggcgacagcggtggtccctttgtgtgtgaggacagcatctctcggacgccacgttggcggctgtgtggcattgtgagttggggcactggctgtgccctggcccagaagccaggcgtctacaccaaagtcagtgacttccgggagtggatcttccaggccataaagactcactccgaagccagcggcatggtgacccagctctgaccggtggcttctcgctgcgcagcctccagggcccgaggtgatcccggtggtgggatccacgctgggccgaggatgggacgtttttcttcttgggcccggtccacaggtccaaggacaccctccctccagggtcctctcttccacagtggcgggcccactcagccccgagaccacccaacctcaccctcctgacccccatgtaaatattgttctgctgtctgggactcctgtctaggtgcccctgatgatgggatgctctttaaataataaagatggttttgatt

SEQ ID NO: 437 - DNA, 1642 bp, Homo sapiens; identical to SEQ ID NO: 132

SEQ ID NO: 438 - DNA, 2780 bp, Homo sapiens
gtgggcggaccgcgcggctggaggtgtgaggatccgaacccaggggtggggggtggaggcggctcctgcgatcgaaggggacttgagactcaccggccgcacgccatgagggccctgtgggtgctgggcctctgctgcgtcctgctgaccttcgggtcggtcagagctgacgatgaagttgatgtggatggtacagtagaagaggatctgggtaaaagtagagaaggatcaaggacggatgatgaagtagtacagagagaggaagaagctattcagttggatggattaaatgcatcacaaataagagaacttagagagaagtcggaaaagtttgccttccaagccgaagttaacagaatgatgaaacttatcatcaattcattgtataaaaataaagagattttcctgagagaactgatttcaaatgcttctgatgctttagataagataaggctaatatcactgactgatgaaaatgctctttctggaaatgaggaactaacagtcaaaattaagtgtgataaggagaagaacctgctgcatgtcacagacaccggtgtaggaatgaccagagaagagttggttaaaaaccttggtaccatagccaaatctgggacaagcgagtttttaaacaaaatgactgaagcacaggaagatggccagtcaacttctgaattgattggccagtttggtgtcggtttctattccgccttccttgtagcagataaggttattgtcacttcaaaacacaacaacgatacccagcacatctgggagtctgactccaatgaattttctgtaattgctgacccaagaggaaacactctaggacggggaacgacaattacccttgtcttaaaagaagaagcatctgattaccttgaattggatacaattaaaaatctcgtcaaaaaatattcacagttcataaactttcctatttatgtatggagcagcaagactgaaactgttgaggagcccatggaggaagaagaagcagccaaagaagagaaagaagaatctgatgatgaagctgcagtagaggaagaagaagaagaaaagaaaccaaagactaaaaaagttgaaaaaactgtctgggactgggaacttatgaatgatatcaaaccaatatggcagagaccatcaaaagaagtagaagaagatgaatacaaagctttctacaaatcattttcaaaggaaagtgatgaccccatggcttatattcactttactgctgaaggggaagttaccttcaaatcaattttatttgtacccacatctgctccacgtggtctgtttgacgaatatggatctaaaaagagcgattacattaagctctatgtgcgccgtgtattcatcacagacgacttccatgatatgatgcctaaatacctcaattttgtcaagggtgtggtggactcagatgatctccccttgaatgtttcccgcgagactcttcagcaacataaactgcttaaggtgattaggaagaagcttgttcgtaaaacgctggacatgatcaagaagattgctgatgataaatacaatgatactttttggaaagaatttggtaccaacatcaagcttggtgtgattgaagaccactcgaatcgaacacgtcttgctaaacttcttaggttccagtcttctcatcatccaactgacattactagcctagaccagtatgtggaaagaatgaaggaaaaacaagacaaaatctacttcatggctgggtccagcagaaaagaggctgaatcttctccatttgttgagcgacttctgaaaaagggctatgaagttatttacctcacagaacctgtggatgaatactgtattcaggcccttcccgaatttgatgggaagaggttccagaatgttgccaaggaaggagtgaagttcgatgaaagtgagaaaactaaggagagtcgtgaagcagttgagaaagaatttgagcctctgctgaattggatgaaagataaagcccttaaggacaagattgaaaaggctgtggtgtctcagcgcctgacagaatctccgtgtgctttggtggccagccagtacggatggtctggcaacatggagagaatcatgaaagcacaagcgtaccaaacgggcaaggacatctctacaaattactatgcgagtcagaagaaaacatttgaaattaatcccagacacccgctgatcagagacatgcttcgacgaattaaggaagatgaagatgataaaacagttttggatcttgctgtggttttgtttgaaacagcaacgcttcggtcagggtatcttttaccagacactaaagcatatggagatagaatagaaagaatgcttcgcctcagtttgaacattgaccctgatgcaaaggtggaagaagagcccgaagaagaacctgaagagacagcagaagacacaacagaagacacagagcaagacgaagatgaagaaatggatgtgggaacagatgaagaagaagaaacagcaaaggaatctacagctgaaaaagatgaattgtaaattatactctcaccatttggatcctgtgtggagagggaatgtgaaatttacatcatttctttttgggagagacttgttttggatgccccctaatccccttctcccctgcactgtaaaatgtgggattatgggtcacaggaaaaagtgggttttttagttgaattttttttaacattcctcatgaatgtaaatttgtactatttaactgactattcttgatgtaaaatcttgtcatgtgtataaaaataaaaaagatcccaaat

SEQ ID NO: 439 - DNA, 3132 bp, Homo sapiens
ccgcagaacttggggagccgccgccgccatccgccgccgcagccagcttccgccgccgcaggaccggcccctgccccagcctccgcagccgcggcgcgtccacgcccgcccgcgcccagggcgagtcggggtcgccgcctgcacgcttctcagtgttccccgcgccccgcatgtaacccggccaggcccccgcaacggtgtcccctgcagctccagccccgggctgcacccccccgccccgacaccagctctccagcctgctcgtccaggatggccgcggccaaggccgagatgcagctgatgtccccgctgcagatctctgacccgttcggatcctttcctcactcgcccaccatggacaactaccctaagctggaggagatgatgctgctgagcaacggggctccccagttcctcggcgccgccggggccccagagggcagcggcagcaacagcagcagcagcagcagcgggggcggtggaggcggcgggggcggcagcaacagcagcagcagcagcagcaccttcaaccctcaggcggacacgggcgagcagccctacgagcacctgaccgcagagtcttttcctgacatctctctgaacaacgagaaggtgctggtggagaccagttaccccagccaaaccactcgactgccccccatcacctatactggccgcttttccctggagcctgcacccaacagtggcaacaccttgtggcccgagcccctcttcagcttggtcagtggcctagtgagcatgaccaacccaccggcctcctcgtcctcagcaccatctccagcggcctcctccgcctccgcctcccagagcccacccctgagctgcgcagtgccatccaacgacagcagtcccatttactcagcggcacccaccttccccacgccgaacactgacattttccctgagccacaaagccaggccttcccgggctcggcagggacagcgctccagtacccgcctcctgcctaccctgccgccaagggtggcttccaggttcccatgatccccgactacctgtttccacagcagcagggggatctgggcctgggcaccccagaccagaagcccttccagggcctggagagccgcacccagcagccttcgctaacccctctgtctactattaaggcctttgccactcagtcgggctcccaggacctgaaggccctcaataccagctaccagtcccagctcatcaaacccagccgcatgcgcaagtatcccaaccggcccagcaagacgcccccccacgaacgcccttacgcttgcccagtggagtcctgtgatcgccgcttctcccgctccgacgagctcacccgccacatccgcatccacacaggccagaagcccttccagtgccgcatctgcatgcgcaacttcagccgcagcgaccacctcaccacccacatccgcacccacacaggcgaaaagcccttcgcctgcgacatctgtggaagaaagtttgccaggagcgatgaacgcaagaggcataccaagatccacttgcggcagaaggacaagaaagcagacaaaagtgttgtggcctcttcggccacctcctctctctcttcctacccgtccccggttgctacctcttacccgtccccggttactacctcttatccatccccggccaccacctcatacccatcccctgtgcccacctccttctcctctcccggctcctcgacctacccatcccctgtgcacagtggcttcccctccccgtcggtggccaccacgtactcctctgttccccctgctttcccggcccaggtcagcagcttcccttcctcagctgtcaccaactccttcagcgcctccacagggctttcggacatgacagcaaccttttctcccaggacaattgaaatttgctaaagggaaaggggaaagaaagggaaaagggagaaaaagaaacacaagagacttaaaggacaggaggaggagatggccataggagaggagggttcctcttaggtcagatggaggttctcagagccaagtcctccctctctactggagtggaaggtctattggccaacaatcctttctgcccacttccccttccccaattactattccctttgacttcagctgcctgaaacagccatgtccaagttcttcacctctatccaaagaacttgatttgcatggattttggataaatcatttcagtatcatctccatcatatgcctgaccccttgctcccttcaatgctagaaaatcgagttggcaaaatggggtttgggcccctcagagccctgccctgcacccttgtacagtgtctgtgccatggatttcgtttttcttggggtactcttgatgtgaagataatttgcatattctattgtattatttggagttaggtcctcacttgggggaaaaaaaaaaaaaaaagccaagcaaaccaatggtgatcctctattttgtgatgatgctgtgacaataagtttgaacctttttttttgaaacagcagtcccagtattctcagagcatgtgtcagagtgttgttccgttaacctttttgtaaatactgcttgaccgtactctcacatgtggcaaaatatggtttggtttttcttttttttttttgaaagtgttttttcttcgtccttttggtttaaaaagtttcacgtcttggtgccttttgtgtgatgccccttgctgatggcttgacatgtgcaattgtgagggacatgctcacctctagccttaaggggggcagggagtgatgatttgggggaggctttgggagcaaaataaggaagagggctgagctgagcttcggttctccagaatgtaagaaaacaaaatctaaaacaaaatctgaactctcaaaagtctatttttttaactgaaaatgtaaatttataaatatattcaggagttggaatgttgtagttacctactgagtaggcggcgatttttgtatgttatgaacatgcagttcattattttgtggttctattttactttgtacttgtgtttgcttaaacaaagtgactgtttggcttataaacacattgaatgcgctttattgcccatgggatatgtggtgtatatccttccaaaaaattaaaacgaaaataaagtagctgcgattggg

SEQ ID NO: 440 - DNA, 3658 bp, Homo sapiens; identical to SEQ ID NO: 133

SEQ ID NO: 441 - DNA, 1195 bp, Homo sapiens; identical to SEQ ID NO: 134

SEQ ID NO: 442 - DNA, 1707 bp, Homo sapiens
cggcgctgggctgaggggaggggttgtcttaaaagtctctccttccccctgtaggggcggccggcgagtcccagtgagagcggagggtgccagaggtagggggccgagaaacaaagttcccggggcttcctccggggccgcggtcggggctgcgcgtttgaccgcccccctcctcgcgaagcaatggcttccaaactcctgcgcgcggtcatcctcgggccgcccggctcgggcaagggcaccgtgtgccagaggatcgcccagaactttggtctccagcatctctccagcggccacttcttgcgggagaacatcaaggccagcaccgaagttggtgagatggcaaagcagtatatagagaaaagtcttttggttccagaccatgtgatcacacgcctaatgatgtccgagttggagaacaggcgtggacagcactggctccttgatggttttcctaggacattaggacaagccgaagccctggacaaaatctgtgaagtggatctagtgatcagtttgaatattccatttgaaacacttaaagatcgtctcagccgccgttggattcaccctcctagcggaagggtatataacctggacttcaatccacctcatgtacatggtattgatgacgtcactggtgaaccgttagtccagcaggaggatgataaacccgaagcagttgctgccaggctaagacagtacaaagacgtggcaaagccagtcattgaattatacaagagccgaggagtgctccaccaattttccggaacggagacgaacaaaatctggccctacgtttacacacttttctcaaacaagatcacacctattcagtccaaagaagcatattgaccctgcccaatggaagaaccaggaagatgtggtcattcattcaatagtgtgtgtagtattggtgctgtgtccaaattagaagctagctgaggtagcttgcagcatcttttctagttgaaatggtgaactgataggaaaacaaatgagtagaaagagttcatgaagaggccctcctctgcctttcaaaaggctggtcacctacacatgtttaaggtgtctctgcacatgtctcaagcccatcacaagaaagcaagtacagtgtggatttcaaatggtgtgtaacttcagctccagctggtttttgacagctgttgctgtggtaatatttttgacatgtgatggtgatagtctctggttctccccatccccacaaaggctgttgaaccacagcaccaggaagcctgagaatgaatcctgagggctctagcccaggctttgtcccaggctttctggtgtgtgccctcctggtaacagtgaaattgaagctacttactcatagtggttgtttctctggtcttgagtgactgtgtccacagttcatttttttccggtaggaataactccttttctacatccacgctccatagagtctctccttttcagacatcctgggatgaaagaatttggcttttttttttcttttttttttggacatctgttttcactcttaggcttttaaacaatagttattgcttttatccctctcagattctaataactgagagcgatggggctatattgaatctctgtatgcactgagaactgagctatgaagagaatcttattaaactgctggtctgactttatggattgacactgttcctttcttttattgtgaaaaaaaaaaaaaaa

SEQ ID NO: 443 - DNA, 2304 bp, Homo sapiens
gaattcgtccaaactgaggatcacaagtctccacattctgagtaggaggatgagggtctgagttaggatttgggtcctgcagggcttgctaaggaatcccctgatggcctaggattccacgcagagcacatctggtgtgagagagctcgctgcaagggtgaaggctccgccctatcagatagacaaccaggccaccaagaggcccagccctccaaaccctggatttgcaacatcctcaaagaacagcaacgggccttgagcagaattgagaaggaaatacccccacctgccctcagccgttaagtgggctttgctattcacaagggcctctgggtgtcctggcagagaggggagatggcacaggcaccaggtgctagggtgccagggcctcccgagaaggaacaggtgcaaagcaggcaattagcccagaaggtatccgtggggcaggcagcctagatctgatgggggaagccaccaggattacatcatctgctgtaacaactgctctgaaaagaagatatttttcaacctgaacttgcagtagctagtggagaggcaggaaaaaggaaatgaaacagagacagagggaagcctgagccaaaatagaccttcccgagagaggaggaagcccggagagagacgcacggtcccctccccgcccctaggccgccgccccctctctgccctcggcggcgagcagggcgccgcgacccggggccggaaaggtgccaggggctccgggcggccgggcgggcgcacaccatccccgcgggcggcgcggagccggcgacagcgcgcgagagggaccgggcggtggcggcggcgggaccgggatggaagggagcgcggtgactgtccttgagcgcggaggggcgagctcgccggcggaggccgagcaagcggaggcaggagcggcggcgacggcggcggcggcggcggcgcccgagcacccgagggggtccgagccccggcagccggccagccccgcgccacaaagggagcgcccccgccgcccggcaccccgcctccctccccaatgtcctcggccatcgaaaggaagagcctggacccttcagaggaaccagtggatgaggtgctgcagatccccccatccctgctgacatgcggcggctgccagcagaacatcggggaccgctacttcctgaaggccatcgaccagtactggcacgaggactgcctgagctgcgacctctgtggctgccggctgggtgaggtggggcggcgcctctactacaaactgggccggaagctctgccggagagactatctcaggctttttgggcaagacggtctctgcgcatcctgtgacaagcggattcgtgcctatgagatgacaatgcgggtgaaagacaaagtgtatcacctggaatgtttcaagtgcgccgcctgtcagaagcatttctgtgtaggtgacagatacctcctcatcaactctgacatagtgtgcgaacaggacatctacgagtggactaagatcaatgggatgatataggcccgagtccccgggcatctttggggaggtgttcactgaagacgccgtctccatggcatcttcgtcttcactcttaggcactttgggggtttgagggtggggtaagggatttcttaggggatggtagacctttattgggtatcaagacatagcatccaagtggcataattcaggggctgacacttcaaggtgacagaaggaccagcccttgagggagaacttatggccacagcccatccatagtaactgacatgattagcagaagaaaggaacatttaggggcaagcaggcgctgtgctatcatgatggaatttcatatctacagatagagagttgttgtgtacagacttgttgtgactttgacgcttgcgaactagagatgtgcaattgatttcttttcttcctggctttttaactcccctgtttcaatcactgtcctccacacaagggaaggacagaaaggagagtggccattctttttttcttggcccccttcccaaggccttaagctttggacccaagggaaaactgcatggagacgcatttcggttgagaatggaaaccacaacttttaaccaaacaattatttaaagcaatgctgatgaatcactgtttttagacaccttcattttgaggggaggagttccacagattgtttctatacaaatataaatcttaaaaagttgttcaactattttattatcctagattatatcaaagtatttgtcgtgtgtagaaaaaaaaaacagctctgcaggcttaataaaaatgacagactgaaaaaaaaaaaa

SEQ ID NO: 444 - DNA, 3151 bp, Homo sapiens
ccggccagcgggcgggctccccagccaggccgctgcacctgtcaggggaacaagctggaggagcaggaccctagacctctgcagcccataccaggtctcatggaggggaacaagctggaggagcaggactctagccctccacagtccactccagggctcatgaaggggaacaagcgtgaggagcaggggctgggccccgaacctgcggcgccccagcagcccacggcggaggaggaggccctgatcgagttccaccgctcctaccgagagctcttcgagttcttctgcaacaacaccaccatccacggcgccatccgcctggtgtgctcccagcacaaccgcatgaagacggccttctgggcagtgctgtggctctgcacctttggcatgatgtactggcaattcggcctgcttttcggagagtacttcagctaccccgtcagcctcaacatcaacctcaactcggacaagctcgtcttccccgcagtgaccatctgcaccctcaatccctacaggtacccggaaattaaagaggagctggaggagctggaccgcatcacagagcagacgctctttgacctgtacaaatacagctccttcaccactctcgtggccggctcccgcagccgtcgcgacctgcgggggactctgccgcaccccttgcagcgcctgagggtcccgcccccgcctcacggggcccgtcgagcccgtagcgtggcctccagcttgcgggacaacaacccccaggtggactggaaggactggaagatcggcttccagctgtgcaaccagaacaaatcggactgcttctaccagacatactcatcaggggtggatgcggtgagggagtggtaccgcttccactacatcaacatcctgtcgaggctgccagagactctgccatccctggaggaggacacgctgggcaacttcatcttcgcctgccgcttcaaccaggtctcctgcaaccaggcgaattactctcacttccaccacccgatgtatggaaactgctatactttcaatgacaagaacaactccaacctctggatgtcttccatgcctggaatcaacaacggtctgtccctgatgctgcgcgcagagcagaatgacttcattcccctgctgtccacagtgactggggcccgggtaatggtgcacgggcaggatgaacctgcctttatggatgatggtggctttaacttgcggcctggcgtggagacctccatcagcatgaggaaggaaaccctggacagacttgggggcgattatggcgactgcaccaagaatggcagtgatgttcctgttgagaacctttacccttcaaagtacacacagcaggtgtgtattcactcctgcttccaggagagcatgatcaaggagtgtggctgtgcctacatcttctatccgcggccccagaacgtggagtactgtgactacagaaagcacagttcctgggggtactgctactataagctccaggttgacttctcctcagaccacctgggctgtttcaccaagtgccggaagccatgcagcgtgaccagctaccagctctctgctggttactcacgatggccctcggtgacatcccaggaatgggtcttccagatgctatcgcgacagaacaattacaccgtcaacaacaagagaaatggagtggccaaagtcaacatcttcttcaaggagctgaactacaaaaccaattctgagtctccctctgtcacgatggtcaccctcctgtccaacctgggcagccagtggagcctgtggttcggctcctcggtgttgtctgtggtggagatggctgagctcgtctttgacctgctggtcatcatgttcctcatgctgctccgaaggttccgaagccgatactggtctccaggccgagggggcaggggtgctcaggaggtagcctccaccctggcatcctcccctccttcccacttctgcccccaccccatgtctctgtccttgtcccagccaggccctgctccctctccagccttgacagcccctccccctgcctatgccaccctgggcccccgcccatctccagggggctctgcaggggccagttcctccacctgtcctctgggggggccctgagagggaaggagaggtttctcacaccaaggcagatgctcctctggtgggagggtgctggccctggcaagattgaaggatgtgcagggcttcctctcagagccgcccaaactgccgttgatgtgtggaggggaagcaagatgggtaagggctcaggaagttgctccaagaacagtagctgatgaagctgcccagaagtgccttggctccagccctgtaccccttggtactgcctctgaacactctggtttccccacccaactgcggctaagtctctttttcccttggatcagccaagcgaaacttggagctttgacaaggaactttcctaagaaaccgctgataaccaggacaaaacacaaccaagggtacacgcaggcatgcacgggtttcctgcccagcgacggcttaagccagcccccgactggcctggccacactgctctccagtagcacagatgtctgctcctcctcttgaacttgggtgggaaaccccacccaaaagccccctttgttacttaggcaattccccttccctgactcccgagggctagggctagagcagacccgggtaagtaaaggcagacccagggctcctctagcctcatacccgtgccctcacagagccatgccccggcacctctgccctgtgtctttcatacctctacatgtctgcttgagatatttcctcagcctgaaagtttccccaaccatctgccagagaactcctatgcatcccttagaaccctgctcagacaccattacttttgtgaacgcttctgccacatcttgtcttccccaaaattgatcactccgccttctcctgggctcccgtagcacactataacatctgctggagtgttgctgttgcaccatactttcttgtacatttgtgtctcccttcccaactagactgtaagtgccttgcggtcagggactgaatcttgcccgtttatgtatgctccatgtctagcccatcatcctgcttggagcaagtaggcaggagctcaataaatgtttgttgcatgaaaaaaaaaaaaaaaaaa

SEQ ID NO: 445 - DNA, 415 bp, Homo sapiens
ccgctgcgtgttttcctcttgatcgggaactcctgcttctccttgcctcgaaatggaccccaactgctcctgctcgcctgttggctcctgtgcctgtgccggctcctgcaaatgcaaagagtgcaaatgcacctcctgcaagaagagctgctgctcctgctgccctgtgggctgtgcmaagtgtgcccagggctgcatctgcaaagggacgtcagacaagtgcagctgctgtgcctgatgccaggacagctgtgctctcagatgtaaatagagcaacctatataaacctggatttttttttttttttttttgtacaaccctgacccgtttgctacatctttttttctatgaaatatgtgaatggcaataaattcatctagactaaaaaaaaaaaaaaaaaaaaaaaaaaaaaaaa

SEQ ID NO: 446 - DNA, 1011 bp, Homo sapiens
gatttgcggaagaacctgaccgtggacgagggcaccatgaaggtagaggtgctgcctgccctgaccgacaactacatgtacctggtcattgatgatgagaccaaggaggctgccattgtggatccggtgcagccccagaaggtcgtggacgcggcgagaaagcacggggtgaaactgaccacagtgctcaccacccaccaccactgggaccatgctggcgggaatgagaaactggtcaagctggagtcgggactgaaggtgtacgggggtgacgaccgtatcggggccctgactcacaagatcactcacctgtccacactgcaggtggggtctctgaacgtcaagtgcctggcgaccccgtgccacacttcaggacacatttgttacttcgtgagcaagcccggaggctcggagccccctgccgtgttcacaggtgacaccttgtttgtggctggctgcgggaagttctatgaagggactgcggatgagatgtgtaaagctctgctggaggtcttgggccggctccccccggacacaagagtctactgtggccacgagtacaccatcaacaacctcaagtttgcacgccacgtggagcccggcaatgccgccatccgggagaagctggcctgggccaaggagaagtacagcatcggggagcccacagtgccatccaccctggcagaggagtttacctacaaccccttcatgagagtgagggagaagacggtgcagcagcacgcaggtgagacggacccggtgaccaccatgcgggccgtgcgcagggagaaggaccagttcaagatgccccgggactgaggccgccctgcaccttcagcggatttggggattaggctcttttaggtaactggctttcctgctggtccgtgcgggaaattcagtcttgatttaaccttaattttacagcccttggcttgtgttatcggacattctaatgcatatttataagagaagtttaacaagtatttattcccataaaaaaaaaaaaaa

SEQ ID NO: 447 - DNA, 4211 bp, Homo sapiens; identical to SEQ ID NO: 135

SEQ ID NO: 448 - DNA, 1877 bp, Homo sapiens
cgcccccagagtctggctttccgcggctgcccgcctcgcgcgtcttccctgcccgggtctcctcgctgtcgccgccgctgccacaccatggccttcgtcaccaggcagttcatgcgttccgtgtcctcctcgtccaccgcctcggcctcggccaagaagataatcgtcaagcacgtgacggtcatcggcggcgggctgatgggcgccggcattgcccaggttgctgcagcaactggtcacacagtagtgttggtagaccagacagaggacatcctggcaaaatccaaaaagggaattgaggaaagccttaggaaagtggcaaagaagaagtttgcagaaaaccctaaggccggcgatgaatttgtggagaagaccctgagcaccatagcgaccagcacggatgcagcctccgttgtccacagcacagacttggtggtggaagccatcgtggagaatctgaaggtgaaaaacgagctcttcaaaaggctggacaagtttgctgctgaacatacaatctttgccagcaacacttcctccttgcatattacaagcatagctaatgccaccaccagacaagaccgattcgctggcctccatttcttcaacccagtgcctgtcatgaaacttgtggaggtcattaaaacaccaatgaccagccagaagacatttgaatctttggtagactttagcaaagccctaggaaagcatcctgtttcttgcaaggacactcctgggtttattgtgaaccgcctcctggttccatacctcatggaagcaatcaggctgtatgaacgaggtgacgcatccaaagaagacattgacactgctatgaaattaggagccggttaccccatgggcccatttgagcttctagattatgtcggactggatactacgaagttcatcgtggatgggtggcatgaaatggatgcagagaacccattacatcagcccagcccatccttaaataagctggtagcagagaacaagttcggcaagaagactggagaaggattttacaaatacaagtgatgtgcagcttctccggctctgagaagaacacctgagagcgctttccagccagtgccccgagtgcctgtgggaatgctctttggtcagacattccctcacacagtacagtttaataaatgtgcattttgattgtaatctatcgaagtgattattacaccagttacagcagtaatagattctccattaagaaataattcccttttttagtctgttcatttctgtgtattttctaaacagctttacacccttggtgccttggagcaaacatgttttttgaaccttgtcatttttgtgaagaattgcctagattccttctctcatcaacgggaaagtacttcctctgagagtgcgagtgcaccatgctcactgttgctgcgtgggagagtcacaagccactggcaagcaagtggtatagtctgtgaagcactgcagcgagcagcacctggatcttgcctttataagaacattttactacctgcagctttgagtcttgccctacattttgggcatgacataagatgtgtctttattcagctcgtcgtgaagatgctgctgctgaatgggtcagcatatctctgtttgcatggtttgcaggaggtcggttttcatggtcattcagttccacagatctgaatgattactgtctgtctgtgtcttttttccatgagaaatcactgttgcaaattgcctataaattgactctactaaaataacaatgtttcagtctgaaaatttgaattgaaaaaaatgtataatataaaattgtaatacactcaaatgattataaaagtaaaagttggtaatttaggcaaaaaaaaaaaaaaaaaaaaaaaaaaaaaaaaaaa

SEQ ID NO: 449 - DNA, 2770 bp, Homo sapiens
ggcgccccgcctcccgcccgccatgcccgcgccccgcgccccgcgcgctctggcggccgccgcgcccgcgtccgggaaggccaagctgacgcacccggagaaggcgatcctggcaggcggcctggcgggtggcatcgagatctgcatcaccttccccaccgagtacgtgaagacgcagctgcagctggacgagcgctcgcacccgccgcggtaccggggcatcggtgaggagggggagggccgcggccgccgggcgggcgggtacccagggcgggccaccgagggccgtggggtcctgaccgccccctcccccaggggactgcgtgcggcagacggttcgcagccatggcgtcctgggcctgtaccgcggccttagctccctgctctacggttccatccccaaggcggccgtcagtgtaggccggcgtctgcgggagggggctcggccgcgggcagcccctctcacccgcctcccgcctccaggtttggaatgttcgagttcctcagcaaccacatgcgggatgcccagggacggctggacagcacgcgtgggctgctgtgcggcctgggcgctggcgtggccgaggccgtggtggtcgtgtgccccatggagaccatcaaggtggggaaggtcctggcgaggacccggacagcgagggagtacggagacgggcggccccgctggcccggtgctcccggggcaaccgcaagctggggagggtctcctggacgccagggaaggccggcggggtgacccgggggccctggggcaggacgcctgccacgaagggccacccgtggaggctgagtctatgctaaaggcagccttaaagtctttaaaaaatacttttataaagcagaaaacaaaatgacaccttcactgccaaaactggaaaagagcagcaaacataaagggagaggctgctcacagggctgccctgtgtccagagcatggtctcgtgtgggctgccctgtgtcccggggcatggtccgtgtgggcagcccagggcgcttggctgcacggcttcctggggaagagttcccagttccctccaccctggatgggccctgggctgccagctagccaggacccacccaggtgcagccgagaacctgcgcctttgcttctctctctcaggtgaagttcatccacgaccagacctccccaaaccccaagtacagaggattcttccacggggttagggagattgtgcgggaacaaggtgagccactcgaccttcctgatagggctcagggacctgggcagggtgggaagggcctgcacctcccatcctgccttgggctttgtgcaacacccaccccccacacacaccaattcccaaccggggcctgagaggctgcagggtaaccccgtgcctgccttcccgcagggctgaaggggacgtaccagggcctcacagccactgtcctgaagcagggctcgaaccaggccatccgcttcttcgtcatgacctccctgcgcaactggtaccgaggtgtgtctgcatcacagggccccatctctgcacatggccagctcctctcctctccttggggccacccctgggtggcgggcacccaccttttgaagtgctgatccaggcccctcccggcaccctctgacccacctcacccctcctatatccaggggacaaccccaacaagcccatgaaccctctgatcactggggtcttcggagctattgcaggcgcagcgagtgtctttggaaacactcctctggatgtgattaagacccggatgcaggtggtggggccgggaaggggaggggaaggggggaccaggccagagctagctgctgagcccctgcctgctgatgtccccataggcctggaggcgcacaaataccggaacacgtgggactgcggcttgcagatcctgaagaaggaggggctcaaggcgtgagtggggaggggcagggctattgtccccacctcaaacctttcgccctacctggcctgcccactctgtccccttcagcctctgtgcctctcacttcagtatctggggattgccctgtgcagggacactgtgctgacctgccttcctctccccgcccctcctcccacccagattctacaagggcactgtcccccgcctgggccgggtctgcctggatgtggccatagtgtttgtcatctatgatgaagtggtgaagctgctcaacaaagtgtggaagacggactaagcctagagaggccgcaaggggaccgccccaggcaccgcagagtgtctcgtacctttgtctcacatgattcagtgcagtagtgccaaaaggcccttccacgtcctcgagctctgtagcctggtctgtgcattgtggctgtcaaatccatgtgtcccccctgtggtctgtgtgtgacaccaccactgtgtcccagtgtctggcccagcatggcggtatgtgcatctggcctatgaccctgtgcccacttgtcatgtgcttactgtgaaccctgtgcctgtgtttcatgttctgtcacgtgaccctgtgccgcctcccggggtgcccgtgtggcctgggtcctcgccctgtagccctgccggtcccagtccggtgccttccaccctgccctggcctaccacagctgcctccggcctcggcctggcttcaccgcattccaggctgcagccccctgcttctcccgccattgccttaactgccctcgggccctctctccgccccggacagggtggcacccaccactctcaggaccaccctgccaaggcagaataaaccggatcctgttgc

SEQ ID NO: 450 - DNA, 825 bp, Homo sapiens
aagcttgatagcaagttcagcctggttaagtccaagctgaattccgtgcaccctgagccggagctgcccagtcgccgcgggaccggggccgctggggtctggacgggggtcgccatgatccgctttatcctcatccagaaccgggcaggcaagacgcgcctggccaagtggtacatgcagtttgatgatgatgagaaacagaagctgatcgaggaggtgcatgccgtggtcaccgtccgagacgccaaacacaccaactttgtggagttccggaactttaagatcatttaccgccgctatgctggcctctacttctgcatctgtgtggatgtcaatgacaacaaactggcttacctggagggcattcacaacttcgtggaggtcttaaacgaatatttccacaatgtctgtgaactggacctggtgttcaacttctacaaggtttacacggtcgtggacgagatgttcctggctggcgaaatccgagagaccagccagacgaaggtgctgaaacagctgctgatgctacagtccctggagtgagggcaggcgagcaccccaccccggccccggcccctcctggaatcgcctgctcgcttccccttcccaggcccgtggccaacccagcagtccttccctcaactgcctaggaggaagggacccagctgggtctgggccacaagggaggagacttcaccccacttcctctgggccctggctgtgggcagaggccaccgtgtgtgtcccgagtaaccgtgccgttgtcgtgtgattccataagcgtctgtgcgtggagtccccaataaacctgtggtcctgcctggc

SEQ ID NO: 451 - DNA, 1965 bp, Homo sapiens
  misc_feature (1)...(1965): n=a,t,g or c
gagagacaaagaccccgaacacctccaacatgaagcttcttcatgttttcctgttatttctgtgcttccacttaaggttttgcaaggtcacttatacatctcaagaggatctggtggagaaaaagtgcttagcaaaaaaatatactcacctctcctgcgataaagtcttctgccagccatggcagagatgcattgagggcacctgtgtttgtaaactaccgtatcagtgcccaaagaatggcactgcagtgtgtgcaactaacaggagaagcttcccaacatactgtcaacaaaagagtttggaatgtcttcatccagggacaaagtttttaaataacggaacatgcacagccgaaggaaagtttagtgtttccttgaagcatggaaatacagattcagagggaatagttgaagtaaaacttgtggaccaagataagacaatgttcatatgcaaaagcagctggagcatgagggaagccaacgtggcctgccttgaccttgggtttcaacaaggtgctgatactcaaagaaggtttaagttgtctgatctctctataaattccactgaatgtctacatgtgcattgccgaggattagagaccagtttggctgaatgtacttttactaagagaagaactatgggttaccaggatttcgctgatgtggtttgttatacacagaaagcagattctccaatggatgacttctttcagtgtgtgaatgggaaatacatttctcagatgaaagcctgtgatggtatcaatgattgtggagaccaaagtgatgaactgtgttgtaaagcatgccaaggcaaaggcttccattgcaaatcgggtgtttgcattccaagccagtatcaatgcaatggtgaggtggactgcattacaggggaagatgaagttggctgtgcaggctttgcatctgtggctcaagaagaaacagaaattttgactgctgacatggatgcagaaagaagacggataaaatcattattacctaaactatcttgtggagttaaaaacagaatgcacattcgaaggaaacgaattgtgggaggaaagcgagcacaactgggagacctcccatggcaggtggcaattaaggatgccagtggaatcacctgtgggggaatttatattggtggctgttggattctgactgctgcacattgtctcagagccagtaaaactcatcgttaccaaatatggacaacagtagtagactggatacaccccgaccttaaacgtatagtaattgaatacgtggatagaattattttccatgaaaactacaatgcaggcacttaccaaaatgacatcgctttgattgaaatgaaaaaagacggaaacaaaaaagattgtgagctgcctcgttccatccctgcctgtgtcccctggtctccttacctattccaacctaatgatacatgcatcgtttctggctggggacgagaaaaagataacgaaagagtcttttcacttcagtggggtgaagttaaactaataagcaactgctctaagttttacggaaatcgtttctatgaaaaagaaatggaatgtgcaggtacatatgatggttccatcgatgcctgtaaaggggactctggaggccccttagtctgtatggatgccaacaatgtgacttatgtctggggtgttgtgagttggggggaaaactgtggaaaaccagagttcccaggtgtttacaccaaagtggccaattattttgactggattagctaccatgtaggaaggccttttatttctcagtacaatgtataaaattgtgatctctctcttcattctattctttttctctcaagagttccatttaatggaaataaaacggtataattaataattctctaggggggaaaaatgaagcaaatctcattggatatttttaaaggtctccacagagtttatgccatattggaattttgttgtataattctcnngcgaattc

SEQ ID NO: 452 - DNA, 4797 bp, Homo sapiens
  misc_feature (1)...(4797): n=a,t,g or c
cctgggaccaaagtgctgcccagagctgagggtcctggagccacatgagaaggcttctccctgtgtacctgtgcagcacagggtagggtgagtccactcagctgtctaggagaggacccaggagcagcagagacncgccaagcctttactcataccatattctgatccttttccagcaaattgtggctactaatttgccccctgaagatcaagatggctctggggatgactctgacaacttctccggctcaggtgcaggtgaggttgtcatgggggccccccccacccaagacggcaacaggtcatgcctgggggcagtggtcaggcagtctcctgtgtttactgagcatgtactgagtgcaccctgcctgccctgtctccacccagctggctccaaagggcaatgctgaggagaggaatggggtcgtgagctgctgttaaggagagctcatgcttggaggtgaggtgaaggctgtgagctccagaaggccccagggcgcnctgctgcacgcaggctcatattcactaggaatagctttactcactaagaaacctctggaacccccttcagaaggttatttgactcctgagcctctattttctcatctgcaaaatgggaataataccttgacctgataagcttgtggagctgtaaggcagcacagagccagctggggtgtagctcttccatccaagctcccttccttacttcccctttcctgtggggactgggggagagaagtccctgagctggaggtggtcagggaagcttcacagaggaggtggctcttgagtggacctcaggaagaggggtgagagagctaaggaaggaggctgaggtcatccctggggaagtgacctagcggaggcctgagagctgcaaggtaggatatctgttgttggaagtgtctgttgttggaagtgggggcctttttttcagggagggtggggccagagaagtgtgtgccctgggataagtaggataaccacagtagttatgcccctaagggatgcccaccccacccctgtggtcacagaaaagctttcccaggtggcctaggcacctgtctcgtggctccagagacaggctgcacctgacacacacaatggaaggacagctctccttgtccattttccaaggagcttagcctcagctgccttgtccaggtactagcctccctcatagcctgagcttggccagcccaggtgctctggagcctcccccgacccacccaacacactctgcttctggtcctccccaccccccacctccccaacacactctgcttctggtcctgcaggtgctttgcaagatatcaccttgtcacagcagaccccctccacttggaaggacacgcagctcctgacggctattcccacgtctccagaacccaccggcctggaggctacagctgcctccacctccaccctgccggctggagaggggcccaaggagggagaggctgtagtcctgccagaagtggagcctggcctcaccgcccgggagcaggaggccaccccccgacccagggagaccacacagctcccgaccactcatcaggcctcaacgaccacagccaccacggcccaggagcccgccacctcccacccccacagggacatgcagcctggccaccatgagacctcaacccctgcaggacccagccaagctgaccttcacactccccacacagaggatggaggtccttctgccaccgagagggctgctgaggatggagcctccagtcagctcccagcagcagagggctctggggagcaggtgagtggcctctgcattccttgggaaattgagtgggttggtcctaatgcctggcacttggcaggccctacacctgtgccctgcgcgatctcgtattcctcaccaggaagacagggcacaggggccgccttcccctacccccagggcctcgcagagcaggacagactaactatgagatcagagcagaagcacccttaaagatcacccaagagagggctcccaaactcacaatccaaacttgcagccctcgtcgaagagtgaacgttataccagtcattttatttatagcttcgtggatttacgcttacactaaatagtctgctattcatacaaaatgtgtgctttgtatcactttttgtgatatccatgccatggtccagccagggtccggagttgatgtggcaagaaggcctggctttcgggccctgtgcgatcctggtttgggtgcatctgagtgggtggtggcaaagatcagggaggcaggagctgcttctgggtctgtagtggagctggttgctgctgctggcggtgacctggccaacccaatctgcccctgccctcccacaggacttcacctttgaaacctcgggggagaatacggctgtagtggccgtggagcctgaccgccggaaccagtccccagtggatcagggggccacgggggcctcacagggcctcctggacaggaaagaggtgctgggaggtgagttttctttcaggggggtagtttggggtgaattgctgctgtggggtcagggtggggctgaccacagccaaggccactgctttgggagggtctgcacgagagcccaaggagccgctgagctgagctggccccgtctacctgccctaggggtcattgccggaggcctcgtggggctcatctttgctgtgtgcctggtgggtttcatgctgtaccgcatgaagaagaaggacgaaggcagctactccttggaggagccgaaacaagccaacggcggggcctaccagaagcccaccaaacaggaggaattctatgcctgacgcgggagccatgcgccccctccgccctgccactcactaggcccccacttgcctcttccttgaagaactgcaggccctggcctcccctgccaccaggccacctccccagcattccagcccctctggtcgctcctgcccacggagtcgtgggtgtgctgggagctccactctgcttctctgacttctgcctggagacttagggcaccaggggtttctcgcataggacctttccaccacagccagcacctggcatcgcaccattctgactcggtttctccaaactgaagcagcctctccccaggtccagctctggaggggagggggatccgactgctttggacctaaatggcctcatgtggctggaagatcctgcgggtggggcttggggctcacacacctgtagcacttactggtaggaccaagcatcttgggggggtggccgctgagtggcaggggacaggagtcactttgtttcgtggggaggtctaatctagatatcgacttgtttttgcacatgtttcctctagttctttgttcatagcccagtagaccttgttacttctgaggtaagttaagtaagttgattcggtatccccccatcttgcttccctaatctatggtcgggagacagcatcagggttaagaagacttttttttttttttttaaactaggagaaccaaatctggaagccaaaatgtaggcttagtttgtgtgttgtctcttgagtttgtcgctcatgtgtgcaacagggtatggactatctgtctggtggccccgttctggtggtctgttggcaggctggccagtccaggctgccgtggggccgccgcctctttcaagcagtcgtgcctgtgtccatgcgctcagggccatgctgaggcctgggccgctgccacgttggagaagcccgtgtgagaagtgaatgctgggactcagccttcagacagagaggactgtagggagggcggcaggggcctggagatcctcctgcaggctcacgcccgtcctcctgtggcgccgtctccaggggctgcttcctcctggaaattgacgaggggtgtcttgggcagagctggctctgagcgcctccatccaaggccaggttctccgttagctcctgtggccccaccctgggccctgggctggaatcaggaatattttccaaagagtgatagtcttttgcttttggcaaaactctacttaatccaatgggtttttccctgtacagtagattttccaaatgtaataaactttaatataaagtagtctgtgaatgccactgccttcgcttcttgcctctgtgctgtgtgtgacgtgaccggacttttctgcaaacaccaacatgttgggaaacttggctcgaatctctgtgccttcgtctttcccatggggagggattctggttccagggtccctctgtgtatttgcttttttgttttggctgaaattctcctggaggtcggtaggttcagccaaggttttataaggctgatgtcaatttctgtgttgccaagctccaagcccatcttctaaatggcaaaggaaggtggatggccccagcacagcttgacctgaggctgtggtcacagcggaggtgtggagccgaggcctaccccncagacaccttggacatcctcctcccacccggctgcagaggccagannccagcccagggtcctgcacttacttgcttatttgacaacgtttcagcgactccgttggccactccgagagtgggccagtctgtggatcagagatgcaccaccaagccaagggaacctgtgtccggtattcgatactgcgactttctgcctggagtgtatgactgcacatgactcgggggtggggaaaggggtcggctgaccatgctcatctgctggtccgtgggacggtncccaagccagaggtgggttcatttgtgtaacgacaataaacggtacttgtcatttcgggcaacggctgctgtggtggtggttgagtctcttcttggcct

SEQ ID NO: 453 - DNA, 993 bp, Homo sapiens
cggcggcgcgcgatcgaggtcgggtcgccgtccagcctgcagcatgagcgcccccagcgcgacccccatcttcgcgcccggcgagaactgcagccccgcgtggggggcggcgcccgcggcctacgacgcagcggacacgcacctgcgcatcctgggcaagccggtgatggagcgctgggagaccccctatatgcacgcgctggccgccgccgcctcctccaaagggggccgggtcctggaggtgggctttggcatggccatcgcagcgtcaaaggtgcaggaggcgcccattgatgagcattggatcatcgagtgcaatgacggcgtcttccagcggctccgggactgggccccacggcagacacacaaggtcatccccttgaaaggcctgtgggaggatgtggcacccaccctgcctgacggtcactttgatgggatcctgtacgacacgtacccactctcggaggagacctggcacacacaccagttcaacttcatcaagaaccacgcctttcgcctgctgaagccggggggcgtcctcacctactgcaacctcacctcctggggggagctgatgaagtccaagtactcagacatcaccatcatgtttgaggagacgcaggtgcccgcgctgctggaggccggcttccggagggagaacatccgtacggaggtgatggcgctggtcccaccggccgactgccgctactacgccttcccacagatgatcacgcccctggtgaccaaaggctgagcccccaccccggcccggccacacccatgccctccgccgtgccttcctggccgggagtccagggtgtcgcaccagccctgggctgatcccagctgtgtgtcaccagaagctttcccggcttctctgtgaggggtcccaccagcccagggctgatcccagctgtgtgtcaccagcagctttcccagcttgctctgtgagggtcactgctgcccactgcagggtgccctgaggtgaagccg

SEQ ID NO: 454 - DNA, 1044 bp, Homo sapiens
gaccggggcgtgcggagggatgtggcccggaatattggtagggggggcccgggtggcgtcatgcaggtaccccgcgctggggcctcgcctcgccgctcactttccagcgcagcggccgccgcagcggacactccagaacggcctggccctgcagcggtgcctgcacgcgacggcgacccgggctctcccgctcattcccatcgtggtggagcagacgggtcgcggcgagcgcgcctatgacatctactcgcggctgctgcgggagcgcatcgtgtgcgtcatgggcccgatcgatgacagcgttgccagccttgttatcgcacagctcctcttcctgcaatccgagagcaacaagaagcccatccacatgtacatcaacagccctggtggtgtggtgaccgcgggcctggccatctacgacacgatgcagtacatcctcaacccgatctgcacctggtgcgtgggccaggccgccagcatgggctccctgcttctcgccgccggcaccccaggcatgcgccactcgctccccaactcccgtatcatgatccaccagccctcaggaggcgcccggggccaagccacagacattgccatccaggcagaggagatcatgaagctcaagaagcagctctataacatctacgccaagcacaccaaacagagcctgcaggtgatcgagtccgccatggagagggaccgctacatgagccccatggaggcccaggagtttggcatcttagacaaggttctggtccaccctccccaggacggtgaggatgagcccacgctggtgcagaaggagcctgtagaagcagcgccggcagcagaacctgtcccagctagcacctgagagctgggcctcctctccagaatcatgtggaggggccagaggcttgccagacccccagctgggccctgctcaccccttgttgctgggcttggaggggcctcttgaggaacttttaatttgcaggggtgcccgctatggacggggcattccagctgagacactgtgattttaaattaaatctttgtggtctt

SEQ ID NO: 455 - DNA, 145831 bp, Homo sapiens
aagctttaagtgcagagcaagaaggaattgaaccttttattatgattccttgagcacctaactaggtgctagactaatgattacaacctgctaacacagaggagtgatttttgtttttaaattgagttaacttaatatatcaaaaaaagaaatctgtttctggcattgctcgaaaaagcagaggacctgacactgcagaatgcagagtgcgagtagcagtccctgtgagatgggctttttgctctgcttttccgcagacctcaccactccctgtcgtctcccaggccatggtaaccattgaccgtggcacctcttttgttcactcacacacgccctgcttcactcatgccttacctgctttgtctctgtagacagtgggaccctccaccctataccaaacctctggggttgggaaaatcatgatccagagccaaggtggatgggcccccctgctcattggaactccaagcccaagtccctgaaccatgaaccccaaaggacatttttccagttctggttctgcttctggaatgcccagggggtcaggagaagccctccttccaaactttagcaggtgacaatttttccgccttagagacctggcccagcaatcttagcctactctggaagcagtgtccacccggggacacaaggaacaagcagattgtgaacagaggcctcctgggtgccagccactgcactggtccctagagggtagaaagacactgtaactggaagctgccctttgtcaagccccaagcattagcccttctgatctttttttttttttaacatggagtctcgctctgtcacgcaggctggagagcagtggtgtgatcctggctcactgcaacctccatttcctgagttcaagcgattcttgtgcctcagcctcccagtagctgggattacaggcacatgccaccacgcccagctaatttttgtatttttagtagagaagtggtttcaccatgttggccaggttggtcttgaactcctgaactcagatgatcctcccacctccgcctcccaacgtgctgggattacaggcatgagccactgcacccagccttctgatctttcaagtcattattgcttcaaagaacctcctccagtaatacaaggataatctatgcaaagacctcaggagaatatttaaaaataagtatgtatcacaaaaagcagccctcttccctggaggcaaacatgattcacaggttcatgtatgtacacacacacacacacacacacacacacacacaccccaaacataagaaaaagtcactccttgtatgttttgcagtatgattttttttccacttaaccctaccttatagttttttctgtctgttcataactatctagtcagacttcaaatatgtttttgaataggtaagacatgcaaatatgaaataaaatagtgtataagggaatatagaacttcccccttcgttcctatttctcgcccttccagttccccttcttagagacactgtggttgctggttacatatgtagccctccagtcatgttatttatttatttatattatttttcgagatggagtctcactctctcacccagactggagtgaagtggcatgatcttggctcactgcaacagccccctcccaggttcaagcaattctcctccctcagcctcccaagtagctgagactacaggcgtgtactaccacacccagctgatttttgtatttttagtagagagggggttttgccatgttggccaggctggtctcgatctcctgacctcaggtgatccacctgcctcggcctgccaaggtgctgggattacaggcttaagccactgtgcccagcctattgctttttttgtgataaagtctcactctgtcacccaggctggagtgcaatggtgcgatctcggctcctgcaacctatgccttctggattcaagcgatcatcccgccccagcctcctgagtagctgggattacaggtgtgcatcaccacacccagataatttttgtattttttgtaaagatgggtttttgccatgttagccaggctggtcttgaactcctgacctcaagtgatccacccacctcagcctcccaaagtgctacaattacaggtgtgagctgctccatccagcctccagtgatgttttatacacatgcagccacatagagagcccctcctgcacccctccaaaatggcagcacaggccccggctgttgtgcgtctcaatctttgcatctaactgtgtattttggccattcatccatggtagtagagagagggccactgcacagtcttctgctatagggatgaaccataatgattaagcctgtctgctattgacaggtatttaggttgtttctagtctttttgctcttaaaagcaaggctgcagcaaaagcacgtgcttggtggaccacgtctgtctctaggttgggtatttagaaagccgtgatattgcactgcagcttcataaagaagccgtgattatccatcactttactgaggaagctcaggggtaggtctgtatgcacaagtcaggcaggtgataaggcaaagccaacactctgcccaggcctgtgtgtctttttttttttgagaccaagtctcgctgtatcacccaggctggagtggagtggcacaatctcagctcactgcaacctctgccacctgagttcaagcagttctcctgcctcagcttcccgagtagctgggattacaggcacgcgccaccacaccttgctaatttttgtatttttagtagagatgaggtttcactgtgttggccgggctggtctcgaactcttgacctcaggtgatccacccaccttggcctcccaaagtgccgggattacaggtgtgagccactgcgcccggccatccctgtgtgtctgaaagccagtgttccttccacttccctcccttccctccctgttcctcatttctgctgcaggccccgggagcaccccctgctcagggctctgtggctgaccatataaagcgtcagagaaaaactggagctgcttcctaatacggtcacaagagggaaatcctgggcctgcagctgggacttgctggtggcacagggcccatgagatgccggctgggacacaggaggctgggatgttgaaacctctgaatttaaccagctggagaggggctcgtggggccagagaggcagaaacacagccaactatggttgggctgggtcgaggtgaaggagaagtggctgaataatgtgggaggaagagcccgatgctgaagccccacgaccctgccgtgagatgtgcggctgcctgcaccagtcttaccttcactccatcgtcataccctggcttgcttagaaagcttttacagaactcagcagagattcagatctacctggaagtatggattaagtgcttgttgtgtgcacggcactgggagagatgtcccaaacaaagaggatggaagtcatattcctctttcagaagctagtgatggagttgaaaaggcagtgtggtccttccttctttttaaaaattcattttattctttttttttttttctttgagacagtctcactttgtcacccaggctggagtgtggtggcatgatctcggctcacataacctctgcctccttggttcaggtgactctcctgcctcagactcctgagtagctgggattacaggcatgcgccaccacacccagctaatttttgtatttttagtaaagacggggttttgccatgttagccaggctgttctcaaactcctgacctcaagtgatctgacctcctcgatttcccaaagtgctggcattaaaggtgtgagccaccatgcccggcctcttccttctttttaaaaattccttttattcttttcttttctctatctctcatctctctttcttcctttctttcttactttccttccttccttccttcttttttttttttttttagagtctcactctgttgcccaggctggagtgcagcaccatgatctcagctcactataacctccacctcctgggttcaagtgattctcctacctcggcctcccgactagctgggattacaggcgcctgccatcatgcctggctaatttttgtatttttagtagagacggggttttgccatgttggccaggctggtctcgaactcctgacctcaagtgatctgacctccttggccacccgaagtgctgggattacagctgactgagtgtctaccctgtccctggcactgtgcggggtgcaggagatacagtagtgtgtgggtcacagtccaggaggtaacatttaggcagagctctaaaagaggagagggaaccagctgtgggaagatgaggggaaaagtgttccaagtggagagaacagcatattgaaggctctaaggtggcaagacttccctctcgtgaaatgaagggagcatagtaagagtcactaaataacattgattgagcacctactacataccagccgccatgctaaatgcttttcgagcattatctcgcagcacatctatgaagggcttgttcgtatgcctccctgttttgtagatgaggataagtgagactcagagaggttaagggacttgcccagggtcacacagcgaagaagtagcaaagtgaaggttcaaattcaagtaccccatacccagttctgagcccttagccactgccctttactgcctccaggtcaagggcttgagtgaggacaggttgggctgtaaatgatacctacattcaaaaggggcgtggcagtggacatggccccagaggagctggagatggagtcgaggcctgaaggagggtggggcttgattgacctttgttcaggtgaccacagactgggctcttctctttgggaggcttgtcctggggacaggggacactgattgaacaggaaatagcccctggcctggctcagtgtagtccactgagtacctactgccgccgtgcaaggcccccaggtcacggaggtgaagtcaggctgtccctgctcccaggaagctgtatcattaatttattcccctggcatgcatttagcaagcatttagttagcacctattctataccaaggcctgtgctgggactgaagaggagaaagggggttccccggactcaaggcacttgcagctggtgtttgcaggatgggtgggagggtcctgggtgatggaatggggaagaggggtgtccaggcaggcagccccccactcccagccccaccaggctggatgttgctcctgggccccgcttacctctaacccttgctttgcttctccatttcggtccgatggagccgcttataccaagctgcttatagttcacccccacggaccccgtgtcctgtttttctgcccatgtccctgctttgtcttgagctggttaacaccttgttgtcctttaagactcagtgcagggaatacctccccacctggaggtttccctgaccacccccaatgtgggttagggccttcccttccttgttcctatcattctctgttcttacgacgtgttttaatgtacttgtctccccctctgatttaagttctttaagggcaggagctatcattgatttctttatctccagcctctgacacagatgtggtatatagtaggtgctcagtaaatggttgatggctatttagacaggcatatgttgactcattcattctccttttaggggatggtgagaacctccgtctccatcaatcctgtttccttttttttttttttttttttttttttgagatgggttctccctctgtcacccaggctggagtgcaatggcaccaccttggctcactacaacctccctccacctcccaggttcaagtgattctcctgcctcagcctgccgagtagctgggactacaggcatgtgccaccatgccctgctaattttttgtatttttggtagaaacagggtctcactgtgttgcctaggttggtcttgaactcctgagtgtgagcaatctgccctccttggtctcccaaagtactgggatcataggtgtgaaccactgcgcccaacaatcctgtaccttcaaagaatattcctctgcagcacccccagacattacataccattgtccctgagtggactgagccctggaaggaccttcccactctctctttttctttctttttcttttttgagacaaggtctcaccgtgtcacacaggctggagtgcatggcacaatcacggcttactgcaacctcaacctcccaggcttaagcaaacctcccacctcagcctcccaagtggctgggactacaggtgaatgccaccatgcccagctaatttttaaatttcttatagagatgggggtctcactgtgctgcccaagctggtctcagacttctgggctcaagcaatcttcctgccttgacctcccaaagtgctgggattacagttgtgagccaccacacccagccagactttcccactctctaattggctccagcccttgactaaaaggcccttgagggctgggatcctgtgtttttttaatgttctaatgtagtcccagcaccttttgcatggcatctgggacgtacagaatgaatgaatgaatgaatgaatgaatgaatgaatgaacgaacgatcagtagtttctgtttctgttggatgggcctaggctggatagcataatggaccatgctcatacctgggggcgggccaggctgggcttggtgctgccaggatcttctttggtgacctcggtcaagtcacttaaccctctgttgcttggttcaccctagctgtaactgagagatggatctgtggttctccctaagtcacttgcagggaagaggatacgctttatggccatcagagtcttgggcagtactgatgtttatcgtttggggaaagcagttcctgtgagacgggttggagcctgtctcctgaactgtgacctcaaccatgggaaaatctagtatccagtaaggaaaaatcatgacaatagtgccttaccacgtacagcatggcgggactcgccttgtgccttgactcctccgtccctgatctgattattttcagatgctcctattcacccagtaggagaggactgctattttttaaatggtaaagtgcatatgacataaaatttaccattttaaacattttaaagaaaacagtgccattaagtgcattcacaatgttgtacagctatcaatttcaagacagggtcttgctctgtcacccaggggctagagtgcaatggtacaatcatagctcactattaccttgagctcctgggatcaagcaatcctcctgactcagcctcccaagtagctgggactacaggtgatcaccaccatggccagctattttttttttttttttttttttgtagagagggggtccggctgttgttgcctgagctggtctcaaacacttagcctgaagcaatcctcccaccttggcctcccaaagtgctgggattacaggcatgagccactacacttggccccagagcatttttatagcctcaaaaggaaaccttatacccatgagcagttcctcctcatttcccacctctttccagcctctgggaaccacaagtctgttttctgtctccatggctttgcctactctagacacttcacataaatgagatgatagagtacgtgacttttcgtgcctggcttctttcactaggcatattttcaagcttcatccacattggagagctcatgtcagtgttggtctctgttttgcagatggggaaggtattaatgatcaggagcaggcgctgtggggtaaacaggagttctagttcccaacttccctccagctgtgtaacctggtgacaacctcaccatgcctcactttgccctcctgtcaaacaggcggtggggaaatcactgttactgagtagttgtgaagatgccacgaggagatgcctctgccatcttctagagactgagtcactggggtttcttcttagatatggacattgggaggtcccagaaagagatcagagggtggtgggaggagagagagcttggaggattattaccttttcctccctccctcctggaccacagttttggcagctgtgtttctgtatgactgcggatccctctggacagcccctttttaggggtgtgtggctttctatgcctccaatgttcagttaacgacattccctctctggctgagtgcggtggttcccacctgtaatcccagcactttgggaggctgagactggcgcatcacctcagctcaggagttcgagaccagcctgggcaatatggtgaaaccctgtctctacaaaaaacaaaataaaaattacctgggcatggttgtgcacacctgtggtaccacctacttgggaggctgaggcgagaggatcacttaagcccagaaactcaaggttgtagtgagccaagatcaccccactacactgcagcctgggcgacagagcaagaccctgtctcaaaaaaaaaaaaaagtaaacaacattctcttctgttcttgctcttcagacttaactgctcccgtcactggttgggtttctttaattctgcacacatatctgtaaacactttctttattaaatgttcctgagttaatatcttaagcacactgttcattttctgtgccacctgttaaatgatgagcatttaatatgattgtcagcatccaaaaaagatcctgcgtagtgcttagttcggtgcccaacacatagtaagtgctcaatgaacggtggctgttatttaagccagtgaggtccggggaggtaaagtggcaggtcggaggagtggagctgagatttgaacccagagctcttcaaaactccacagtttggccaggtgcaatggctcacaactataatcccagtgctttgggaggctgaaatgagagaattgcttgagcccaggaatttgagaccagcctgagcaacacagtgaaacccatgtctctacagaaaatataaacatcagccaggcctggtggcgcccgcctgtagtcctggctactcaggaggctgaggtaggaggatcacctgagtccagaaaggtcaaggtttcagtgagtcacgttcacaccaccgcactccagcctaggtgacagagtgagaccccatctcaaaacaaacacaaaaccccccacagttgcaaaataaaacataggcagcttggaaacccactctcgccctttctcctcttcccacgtacctggaatatcagtgaggcccagggtttccactaagactccaagctccagtttccccatctctaacatgagaatattgagtgcttctgtgcaatctgtctaccctggaggaggtctggaagtaagctgggttctctgtctgcagacgtactctggcctcttctgcgtggtggtcaacccctataaacacctgcccatctactcggagaagatcgtcgacatgtacaagggcaagaagaggcacgagatgccgcctcacatctacgccatcgcagacacggcctaccggagcatgcttcaaggtgagtgaactcagggctgcacggggccagctccagggagcccctcctgtcctgcttgtctgcagttcttgccaggaatgtggagtttggcaggcactgcgagggaccaggagttactgtggctgaaaaagggaaaaagcaaaaggaacatctgtgtttgcagcctgggagggtgagggagagccaagagcttgggcaaatacgggcatgggcccgctccagctccagctccggggctcgctgcccaaggtccccgtcgggccagctgtctgcaaaggatggaaagagggtggggaacagccctggggctgagccattgtggtctgtgttgacacctacctgtccctcaacccctgtgggactgtgggtaaatatcttttcctcttcagcctcagtttcctcatttgtcaaaaggggtgatagtctctatcttgtagcttcttgtgaagattgttaatgctggtttttccaaacttaagacttgtgcctattactttcatgtttatacgttattatttttactattgttttattatttttgagacagggtctcactttctcgcccaggctgaagtgcagtggtgccatctcggctccctgcaacctccgcctcctgggctcaagcaattctcctgcctcagcctcccaagtagctgggactataggtgtggactgtcatgtcaagctaattttaaaaaggtgggtttttttgttttgtttttgttttgttttgttttgtttttggaagtgacaggatcttgctatactggttggtctcaaactcttggcctcaggcgatcctcccactttggcctcccaaagttctgggattataggcatgagccactgcacccaggccttctcaccttctatttagaacactttggagcccctgaaatagccacccccaagtcaaacagagggactaggcagttaatgcaaacaagtgtaccaggtcaggcgaagagtacaagaaactcgaaaactcacaccccctctgaaagggcaccaacaggtgggaacccagggatctgagttgggagttgagaggagcccaattctggaagttcttgaggccggaatccaggtgtgcctgagagatgccacgaccccgcccccaagatagagggactcaggtataagtgccccaactttctgacagtgagccagactccacaggtaggaccagaatcttggcccttctaggcagggcctgccattacctccaaagaccagcaggtggagccttgcaaaggcaatcttggagctgtaatctcaggttgtaaagtgatggctcctggagtcaggtatctgtcttttttttttttttgagacggagtctcgctctgtcgcccaggccggactgcggactgcagtggcgcaatctcggctcactgcaagctccgcttcccgggttcacgccattctcctgcctcagcctcccgagtagctgggactacaggcgcccgccaccgcgcccggctaattttttgtatttttagtagagacggggtttcaccttgttagccaggatggtctcgatctcctgacctcatgatccacccgcctcggcctcccaaagtgctgggattacaggcataagccaccatacccagcaattcctggttcttttctggagctgaggtcccactaagcacattttaatctaaataccaaaaagaaagaaaattctgttagcaaaggagaaggagggggagcgacagatgggtaagcatttctacagtgctctgaaaaaatttatttgtaacttgaaaaagtctttaatattgtatattcattctagaaaaacttaaacatatatttaagtaaaagagaacttgctggcacctatgattctatcatccaaaactcatcaccattaacattttgttacgtgacctttcattacactaactgaactaaatggcatgaaatgaaggaaatttttactatctgaagataattcgttccagaaaaagatcacttaaaacagagaccaaagtttcactgtagatagtatgtgtgtggaggagggaaagagagtgggcaaaatatttgactgagcttgaaaaatgacattgcaggccaggcacagtggctcacgcctgtaatcctggcactttgggaagcccagatgggtggattgctcgaggtcatgagttcgagaccagcctgggcaatatggcgaaaccctgtctctacaaaaaatacaaaaattactttggtgtggtagcacatacctgtagtcccacttcttgggaggctgaggtgggaggatcgcttgagaccaggaagtggaggttgcagtgagccgagatcacgccactgcattccagcctgggtgagagagccagaccttgtctcaaaagaaaagaaaagaaaaccaacattgcaaattataaaaataggttaatttcagcttacatgtaataagaattttattttaattacaagtaggtgctaatttgtagattcagtataaaatgaattaagagtgggtgtggggtttttttctgtaactttttctgggctgagggatgaaatcatgtgagcataaaacgacatcttcatgtcatgcttgacttctgcagcccgagctaaaaaggatcattcttacagatttatttgatgggtcaccagttttcctaagggcttcttttacttctttagtgtttaagtctctcaaagcccctgtggtcttagcgttcattcagctgtgaattgccctgaatctttttctttcttttgtctttctttctttctttttttttttttttttccggatggagtttccctcttggtgcccaggttggagtgcaatggtgtgatctcagctcactgcaacctccacctcctgggttcaagcgattctactgcctcagcctcccaagtaactgggattataggcatgtgccaccacacccggctaattttgtatttttagtagagatggggtttcaccatgttacccaggatggtctcgatctcctgacattgtgatctgcccgcctcagcctcccatagtgctgggattacaggcatgcaccatcacaccaggctaattttgtatttttagtagagatggggctttaccatgttggtcagactggtcttgaactcctggcctcaggtgatcctcccacctcggcctcccaaagtggtgggattacaggtgtgcaccaccacacttggcccctgaatcttttttttggcctttccaaggccactgactttgccagtcactgcaccttgttttccagaactgccactttgttttgtgttcatatcatgatggtggctattgatacccaataattggcaaggtgaagccactgaatcgtcggagaaggaggtttcggtggagtttgatcgctcttgtagtcattgaagaatacttttgtgttgtggggacttttgctttcctagaccagcagtccccaacctttttgacaccagggaccagtttcatagaagtcagtttttccatggaccgcaggggagagatggttcgggatgattcgagcgcattacatttattgtgcactttatttctatgattacattgtcatatataatgaaatcattatacaactcaccatcatgtagaatcagtgggagccctgagcttgttttcctgcaactagacggtcccatctgggggtgatgggagacagtgacagatcatcaggcattagattctcataaggagcacacagcctggatccctcttatgtgcagttcacagtagggttggtggttctataagagtctaatgccgcctctgatctgagaggaagcagagctcaggcagtaattggagtgatagggagtggctgtaaatacagatgaagcccactactcacctcctgctgtgcagtaccagtcggtggtttgagatgcctgcgctagaccacctcttaactgtgaggcaatgttgtaattgacaaggacaccctgtgttcatatatttgattcctcatggtctctaggttttaacacaaaattgcatagtcagctctcttgaaactacttagaaatgctcacttgacacatagtaagctccaataggaaatgactatcatgattgagcacagcagcatgtcttcagtcctagcactttgggaggccaaggcaggaggatcacttgaggccaggagttagagaccagcctggccaacatagtgagctcttgtctctacaaaaaaataattagctggccacagtgcgtgagtctgtagtcctagctactctggaggctgaggcaggaggatggcttgagcccaggacttcaagaatgcagtgtgctatgatcgtgctatggtactccagccttggcaacagagtaagaccctgtcacgaaagaaagaaagaaaatgaaaaccgtgaatatgcacatccataaaagataaactctttacttaatttaaatgttaaccaacacctgctatgccctcgtctattttggcatgacctggtgctttctggcaaatcattgatggcggactccaaaaataaaaagaatcgggcacggtggctaacgcctgtaatcccagcactttgggaggccaaggtggggggatcatgagatcaggagatcgagaccatcctggctaacgtggtgaatctccgtctctactaaaaatacaaaaaaaactagccaggcacagtggcaggcgcctgtagtcccagctactcagggggtgctgaggcaggagaatggtgtgaacccaagaggcggagcttgcagtgagccgagatcacgccactgcactctagcctgggcaacaaagcgagactccatctcaaaataaataaataaataaaaaataaaaagaatgtcaaaaataatggagaaaaatttaagcttgggaagaattccgttcacctgcttaattttttctccattcccaagtaggaaattggtttttgtgaagaaacacgtaggcccagtgtgttgactccattgataaatggcacgatctcattctgttaagtcactgggctgcgatccacactaagcttaccatgaaggtggagagagaaagctagcacatgtggcttcttccttgagttcttcatggaaaagatggggtgtgaaaaggcgggattgaggagggatgggtaacacacatgcactgaatataagatgaagcattgcagttgtgtcacatagacagtaagttcctgaggacctataaactccatccttcttgcatgtgcatcattgtatctccagcacattttctggtgcctggcacatagtagctgctcagtatttgttgaatcaatgaattattagagttatttatagaaaagaacctaccagggtcaggatggatggggtgggttatttgagagaggtggggctttataagcctcgaagaatggtttgctaaggtgagagaagggggcagggatggctttctagccaagaataataaaagcataaatgtaggggtgagaatgggtatgatgagtgtggcaggagctggtttagaggggttgactagtatactgtggcagggagctcagagccagagctcagccctttgctgcctcacaggagttgggaaaatgggagggactttctaagagatacttcacaacatggcaccctcccaagtggaagccaagccccttgagggtatgggaagagaagctgatatttaaaatatgtatcttatatctgcatatgcataaattatgtcatgtttattttttaaattctccccccctttttttttgaggcagagtctcgccctgccacccaggctggagtgcagcagcacgatctcagctcagtggtatgatttctgctcactgcaacctctgtctcctgggttcaagcaattcttgtgcctcagcctcctgagtagctgggactacaggcacacaccaccatgcctggctaatttttgtatttttagtagagatggggttttgccatgttggccaggctggtttcaaactcctgacctcaggtgatctgcccgcctcaacctcccaaagtgctgagattacaggcatgagccactgcgcccggccgtggtttgtttttggaaagatgttacatacaaattcaaaaggtgaacttctcccttcaacccttgtgcattagacccttagcttccctcccaagagacaattatggtttctagtgtatgaggttttctcctagagatatttttgcaagtataagcaaataggtatctattttcttccctaagatttccctacaaatactagcattccatatatatacagtcctatattttgccagaggatgttacatatcagtgcatgtaggaattccttgttcccttttttaaaaaattggtttttatttttgttaaaagtattcatgcagacggcttagagtcaagtaatttttgaaggcttattaagaaaaatagccatcctctgctacttctcaactcctttaattgattttttttttttttggtatttaccaccatatctctgaaaacaacacttgatcattgtgctgctatcttaattttgttttcaattttaggtatcatctattgactttcctccatgaaagatgaaatttagctcattcaccctctggatttgcccctatttcctcgttccaacacacatgcctcatatcagagtcccagtataattttatcttagttttgacaaactcagtgttcagagtttccattattatgactatgtaatgctatctagagtttacattattatgattatgtagatgttattcaaagctgagctttgcactgctttgtgactatttttcttctttctgtatgacttttctttttcctggagttagcaattgccttttttttccccaatcttgttttccatgtatttaaccaccaattctgccccaaaatctctttctaaatgtgttaatctccttttaatatgtccagacatgtattggatatcatattgatatcatctccttgaatgtgatctctactatagccttctgatctgccctggctttctctatagctagtaactgtcatataggatctttttcaccatccttgaaattccccttagtgctttcatagtggattccttgtttcccagttttcatgtcttcctctttcttgctttactctcctgcttaaatcaagcactttgtccagtagcttcccaagaaagaatgtacgtgatcttgaggcattgagaacttccatatctgagaggcttgatgcttctctaacacttaaaggatagtttagttgggtttaaaatttcaggcaagaaagttgttttcagaaagttataaataactttttttgcctgagctttttaaggcatttgtgttgttgccttctagtttcagttttgagaagatgaaacccaatctgattcgtatgtgtgtatgtttgtgagtgtgtgtgtgtgtgattatattcaccttcctggctgggaatattcttgatcctttgtacatgaccagtttttgtttttcctccttctctagaagcttttagactgtctttgtacccctattcaggatgatgggacttgctatgagtccatttttatttgttatcctggacacttagtggcccaattaatctataaacgtgtgtccacaaattctgggaaatgttgcaaattatttcattgatgctgtctttctccctgtgttctctgtttctttttcttagaagtctttttatttccataatggaattcctagaccaatcctataatttaaatctctttcttttgtcattttcatcactttaatgtttttaatggtattttctgggcacttacctcaacttttttccctaacccttccattgcgttttaaatttctggtatatattttattaaattccaaaaattctattttatttttaaatgtttctttcatatgacattctttttctgtggttgcaatatcctgtttctcagaggatatttaatgcagagtctatttcctccaagatacatattttcctaattgttttaacttctgtctgtcatattagtggatttcttcagatgtcttgggattcttggctatccattcatcttggatgctttagtacacaggataccaaattgttgatggaagctcagtgcttataggatgggcttgctgatgtgcttggctataatatgaaagcactgggctaccccattaggacacttctgtttcgtctttcagtcttttgttcatgggctaatctgattcttcagagaaggtttgtagaaaaatcttctgcctggaggttaaagatttgtctagcatcattttgagggtctagttgaaaagaagctgagggtttcaaaatgtgcagtgaaatttgtacattataccttccttctttcagtatggttcctggtgtccccccaggacggagaccctctgtttaaccctcaccagagactaaacccaccaccttctgtggggtgtgagaagggcagtcacttggcttcagggagtgtagaagatatgggaggggtctaacagtgccttatatttgacccagtccttatgtttttgtctcctccttgatcttttcttccagaggcccctggcattgccagtttctgaggtttggggcagaaatggggaattcggtgttgaaattaggtcgtttcccacctttcctcactgctcacctagacttttttcttggtacctttttttttttttttttttttttttttttttgagatggagtttcactctcgttgtccaggctggagtgcaatggcatgatcttggctcactgcaacctccacctcccgggttcaagtgattctcctgcctcagcctcccaagtagctgggattacaggcatccgccaccacacccggctaatttttgtattttaaatagagatggggttcaaccatgttggtcaggctggtcttgaactcccgaccttaggtgatccacccaactcggcctcccaaagtgctgggattacaggcgtgagccacggtgtctggactttttcttggtacttttcaacgcttatcccattttctgtcttccaagatggctttgctgttctcccctctctagttctttttaaactgcctcatgtatttttacactttttggtttgtttgtttttttttgggggatggagtttccctcttgtcgcgcaagctggagtgcacgatctctgctcactgcagcctccacctcccaggatcaagcgattctgcagcctcagcctcctgagtagctgggattacaggtgcatgccaccatgcccagctaatttctgtatttttagtagagacgggttggccaggctcgtctcgagctcctgacctcaggtgatccactcacctcagcctcccaaagtgctgggattacaggcgtgaaccaccacgcccggcctttttacacttttttttttttgccttttcccccctcttttgtgtggagaatggggtcttgttatattttccaggcaggtcttgaactcctgggctccagctttcctcatgcctgtgccttcctaagagctgggattccaggcatgagccaccatgcccggctaaactggttcatgtatttttggaaagtcttttacagttattttagtaaggtttaggaaggaagagagctaaatgcatgcactcagcctaccatcttctcatgggaattctctcatgccttcttttacaaagaagtgataataataatcatggatttttattatatgcttcctataaagctcagggctttacagaaatattctcagttaatctttaccacaaacctacaaggtggacaggaccagattaggaattttaaaattaagccctgaaactattaaggtgcaggcatatgtcataaaaaaaaattaaattataaagtaaagaaggctgacaaaattgtttttgtttttgctttttttagagacagggtcttgctctgttgcccaggctggagtgtaatggtgcgattgtaactcactgcagcctcaaactcctgggttcagcaatcctgcctcagcttcccaagtagctgagactacagagatgtaccaccatgctcagctaattaaaaaaaaacaactgttttttgtttgtttgttttgagacagagtttcacccctgtcacccaggctggagtgcaatggcacgatctcagctcactgcaacctccacctcctgggttcaagtgattctcctgcctcagcctcctgagtagctgggattacaggcacatgccaccatgcccagctaatttttgtacttttagtagagatggtgtttcaccgtgttgaccagactggtcttgaactcctgacctcaggtgatccacccaccttggccttccaaagtgctgggattacaggcatgagccaccgtgcccagtcttttttatttttgagacaggttctcactttgtcacccaggctagagtgcagtggcacaaacacggctcactgcaggcttgacctcctaggctccagtgatcttctcacctcagctccccaagtagctgggactgcagccatgcaccaccacacccggctaatttttgtattttttgtggagacgggatttcaccatgttgcccaggctggtcttgaactcctgagctcaagtgatccacctgcctaggcttctcaaagtgctgggattacaggtgtgagcccactgtgcctagtgaaaaaactttttttttttttttttttttttttttttttagagataagatcttactgtgttgcccaggctggtctctcattcctggcctcaagtgatcctcctgccttgacctcccaaagtgctgggattatgggtatgagccaccgtgcccagcctaaagttgctatttttcccatgatgtttatcttcgtggtgcttatgaaatggcaactatggcattcttccttctcgtgcatgcctgtgtgggtgtgccctcagcatatgcttacaaggtttattgggtgatccaacgctagccgcaagagctattattagctcccttttacagctgggaaaacagactcagaggagtggagaacttgctgcagatttgttaagtgtcagagccaaatatacacttggattatcctgactccaaagccggagccctgctggtcagtcggtgacaccgggcaaccacagggatccccctcaatcccacggaaggctgtctactgtcttcatctcagagtgttgacagctcaaagcttaggaggctggagctaagttcaataaatgaacgtgatgaataggagaaaagcgccattaaagccctccagacaagaaccactttggagcccctccatgggtccctggggtgtaggaggggcaggaaagcagataagattccattctgagcctctgcacttgccctatgcaagatagccacaagtaatgttttgtcctcacctcattagcaacaaatggccacactcaggggattaaaaaaagaaataacagccagcctttatcagcttggggctcttggctaattcctctttaagcttaagacaactctgcgggtggagtgatccaaacgactttctccactttgcaagttcccacactcggctgtatccttctgcttgagattggcagccccctggggatggttcctgctcacccaactcccctgaggctgctccccagtagaggcagagagaggaagggcactgatgtcctcagggcccctgcaataggtcaggacctgggttcactgctccatcaatcccacattgctcggccctcactagcaccacacagggtgggtggcagcctccccatttgatcaatggggaaaactcagcacacctacttggccccagaactgagagtcaaacctggggacccagcttcgctgccctcagaatgttactcttccctcctgggtagcgtggtatagatagtgtagtattcttgtccccatataacggaagaggaaactgaggcccccagaaggctaagggactagcataggccttgtgtcttagcctgttaaggctgctatatcaaaataccatagactgggtggcttttaaacagatatttgtttctcgtggttctggaggctgggaagtccaagatcaagcttggtatctggtgagggcctagtgctgccttctcgctgtgtctcacatggtggaagggacctgctagctctctgggtctctcccccaatgaggattgaacccccatgatctcatcacctcccaaaggccccacctcctaatatcatcactttaggggtaaggattccagcatatgaatttgagggagacatgagcattcagaccatgacaccttgtaatcagaaaggggttaaatatctttggttgaatatcctgtcctgccgattcagaatcactgctgtctataacctcttccctagatcactgttttagatgatgatgataaagatgatattaacggcaattaccaagctcttaaatgtgctgtgggtaaaacaattttaagctctttctgaatccagtctctttcaatcatcttcatgcccttgaaaggtctggatttttgtcgatttccctggtgaggaaacgggccctgggggcagaggtgatagggtggagccaagaagtaattcccagctgtttctctgcagaggcagtgctgctacaaacacatctccaggaaggggtacagccaaatgcttctctgtctcttgtgggttttgcagtggctgtcagctatgtgtctggcccggttgggaatgatgggggactgtgtgtgggaatgaatggctctgtctggctggctcagtctttacagaggtgctaggagtgtctgtttggtgctctgactaatcatgaaaagttcacgtttttatctttattttatttttatttttggtacccatggtgcattacagggaagggagacagcaaaggagaattatttgttataaaatagtaaatattggccaggcacagtggttcacacctgtaatctcagcactttgggaggcagaggcaggcagatcatctgaggtcaggagttcgagaccagcctggccaatgtagtgaaaccccatctctactaaaaatacaaaaaattagccaggcatggtggtgggcgactataatcccagctactcgggaggctgaggcaggagaatcgcttgaacctgggaggtagaggttgcagtgagccgagattgccccactgcactccagcctgggcaacaagagcaaaactccgtctcaaaaaaaaacaaaaacaaaaacaaaaaccgtaaatattaaattgaaaaagggacatacttaagggagtgaacctgaaaagccccagctgacacttggcaacaccttccttgtttgttttgggcttttttgagacagagtctcactctgttgcccaggctggagtgtagtggtgtgatctcggctcacctgagcctcagcctctccaggctcaggtgatcctcccacctcagcctccagagtagctgcatacaggcatgcaccagtacaactggctaatttttgtattttttgtagagatgaggttttgctatgttgttcaggctggccttgaactcctgagcccaagcaatccacctacctcggcctcccaaagtgctgggattataggcgtgacccacagtgcctggccagcaccttccttgttaaattgcatgtgtcagccacctccctcggtgtcctcccagcctctgggcagtctggctccccattcctttctttatccaacagcatttttttgtgagacaaggccttgccctgttgcccaggctggagtggagtggcacactcatagctcactccagcctccaactcctgggctcaagtgatcctcccctctcagcctcccaagtagctgggaccacaggcacagatcatcacgcctggctaattttttgattttttgtagagatgaggtctcattatgttgcccaggctggtctcgaactcctggcctcaagcaatcctcccgcctcggtctcccaaagtgctggaattacagatgtgatccaccacgcccggtcattctaacaatattgattattagatgttgccctagacacagcctactgtgcgtatgtgtaaatacgaattgaatcatcccacaagtagctgctaagtagaggaggtccagagagtggggaagtgtagccctggggaccttgggaggacaggggaggcttccttggaaggtgaagtgtaggcttggctagggaacttgatataggttctatgaggctgctggggctggagcagagagaagggggagaatgtaggaggtaggagtggaggcccaagagggagagcgttggttttcctgtctcctacaccccttcactggccagttctgctttcatgtttttatttattatatattttttgagacagagtttcactctttcacccaagctagagcgcagtggcacaataatagctccctgtaacctcgaactcctaggctcaagcaattttcctgcctcagccttccaaatagctggggctacaggcacacacctctgtccacagctaattaaaaaaaatttttttttcatagagataggggtctcgctttgagtctcaaactcctcgcctcaagcaatccttctgcctcagcctcccaaagcactgggattacaggcatgagctcctatgcccagcccagttctgcttttacaataccagggcttcctgtaggtttggaaaacacctgttgggttgcagcaaaggctctcaaagtatctcttcttactcagcatgtcatcctaaccaactctgccgggagagtagagtggggagatgaaggctggagaaagagaagggccctcacttacagaatggcttaggtcatgggctctggagctgggttcacctcccagctctgccccggctattactttgtgcctcagtttcctcacttgtcccgtgaggatgatgactgtgcttactccagttgttacaagggtgattcggtcagtgtgtagggacacggtgcatggacaggacaagttcaacaggcattagcagtcagctgccgaggacccaccgtcaagggccatgcagtggccaccttcacagtcacaccacagaagatccagaacctctggcatctgcctccgtgcggggcattaggtagagagccacttttctgcaggcaatggaggctgagacctttcttctttactagcccaggggtattgatggccctgcagagacgggttttgattacctctcactggatcccccagcagcctgttaccagaaagaagggcagacgcagggagcctgggtctgtgctcagtccccgctgggttttctccttttatggtcagcctacagtgctctggcttcccagacagaatccaccagcttgtgtttgggcttgggccgaaatagctggtctgtggggagctgggtacctcctgggagtcctcaggcccacagcgggggaggaaccgctgaagccctttatcttctcaggaaacgtgcctggggccttacacatccgaggctgggtggggagtctggggaggaggaagggagagaggcatgtttaaggatggggtgtgaggtgacatgagccccagggatctgggctgggaagctcagccccaggcgggtcctgatgatggccggccgcccccagctccagccttcccagactccacggaggctcggtactgtgtccccgcccactttggagcttctgtcccaggccctctgcttgggatgctctgcctcgacctctccccaggagattctttcacatttttcttaatgctgttcagtggtcacctctgccgtgaaggcttcctgtcttgctcaggtcagtgtgaaaaaacaaacaaacaaaaaacctgacgtctatagcacttgggttcacatccatcgtagcactgctcatctcttacggtcatttctttgcccatctgactcccaccctgggtcatgaacttctcaaaagcaaggataagcaagtcatgaagctcggtgcattggcttgagcctgtgatttcagttacttgggaggccaaggcgggaggatcacttgaggccaggagtttgggaccagcctgggtaatattactaagttaccttactaggccctgtctctacaaaaaaaatgaaaacaaaaaacaaaaaaaccattagccaggcgtagtggcatgcacctgtagtcccagctgctcaggaggctgagatggaaggatctgttagcccaggagttccagactgcagttagctatgatcgtgctactgcacttcagcctgggcatcagagtgacacctcatctcttaaaaaagaaaagaaaaaaaaaagcagatcttattgacttttgtgctttcggtacctggctcaggactcgtttgttgaatgaatatgtgaacacgtgaatatgcattttccattgcttctaccttggttgcctctctgagccagagagcaattcaaaataacaagcatttcctgagcacctactgtgtgtcaggcattgttccttgtaccttcaggagctcattggttcaggggaaaagcattgaaaatgaacaattttgtaattgttggaaacctaatagagctgcatgaagtggaagaagtcagatttataatcattcagaggtggtataaaatgaacatcatttttaaaaaaggtttatgcggtataatttaaataaattcattttaaggatacagttcacacctaaaattgcagctatgtctgcataactgtctaaattcactcataatttacatggttatgcagccattgctgcaatataattttatatttctatcatcccccaaagaaatcttgtgcacatttttttgtcactccatattcctacccgcagctcctggcagccacgaattcacaaatctactttctgtctctatggatttgcctattctggacatttcatataaatggaatcatatgtgaccttttgtggctggcttcttttttttttttttttttttttttttttttttttttgagacagagtgtctcactgcactcgcccgggctggagtgcagtgatgtggtctcggctcaccacaaactctgcctcctgggttcaagtgattctcctgcctcagcctcccgagtagctgggactataggcacgtgccaccacacctggctaatttttgtatttttagtagagacggggtttcactgtattggccaggctggtcttgaactcctgacctcgtgatctgcccacctcagcctcccaaagtgctgggattacaggtgtgagccaccgtgcccagccggctagcttctttcacttagtataatgttgtcaaggttcatccacgttgtatcatggattcatactatttatatattttttaagacagggtctgtctctgtcaccccagctggagtaccgtggtgcagtcgtggcttactacaacctccacctcctgggctcaagccattgtcccacctcagcctcttgagtagctgagaccacagggattgtgccactatgcccagctaatgtttgcatttttttttgtagagatagggtttcaccatgttgcccaggctggtttcggactcccgggctcaagcaatccacctgcctcagcttcccaaagtgctggaatttcaggcatgagccatggccgccggccataacatcctttcttttcatggctgaatactatcccactgtctgggtagaccacattttgtttatccatctacccattgatgaacatttggttgtttctattttttggatattatgaataaagtccataatttttaccaatatggaaaagaaaaacaagaaaaactctgaatgccatatcatggatagatggcctattatcattccatatcatctgtacctttttccgccagaatgttttgagacatttattaagtaaggatcacaatgatgataattactaaaatggagagaacctgtggaccatgggaaccactaggccatgtgacactcatgtttatattagagaaaggcaccgttttctcaaagcacttttcctccatctgctgaaagattattacaataaatacacaatgcaatacaataaatgaccaatgcaaatagtttctccatagagttatgcagtgtacaacatgcaccacggtccatggccatcctgcaggtaggaggtcaagtggaaaggtctccaactcagctctagaaaagtgcagagttagagaaggtatcatagaagagttgactcccaagacgatgtttcagatacagattagggtatgtacccgaagaattgaaaaggtactcaaactaaaacttgtacaggaatgttcatagcagcactatgcagaatagccaaaaggtggaaataacccaaatgtccgtcaactgttgaatggataaacaaaatatgatccatccgtacaatgtgatatgactcagccacaaataggcataaagtctgggacctgctacaacatggatgaacttcagccacatgctgagtgaaagaagtcagacatgaaaggccgcacatgttataattccatttatgcaaaaatatctagaataggtaagaccatagagacagaaagcaaattggcggttgcaagggcttatgggggagtggctgcttaacgggtagagggtttcatttgggggtgacagaatattttagaactagataaaggtggtagttacgtaacattgtgaatgtactaaatgctcctgaattatgcactttagttatttttttatctttattactattttttgagatggagtctccctctgtcacccaggctggagtgcagtggcgcgatctcagctcactgcaaactccacctccctggttcacgcgattctcctgcctcagcctcctgagtagctgggattacaggtgtgcaccaccgcgcccagctaatttttgtatttttggtagagacggggttttgccgtgttggtctcaaactcccgactttaggagatccagctgtgtcggcctcccaaagtgctgggattacaggcataagccaccgcacctggcttgaattattcactttaaaatggttctttttatgtagtgtaaattttacctcaatggaaggaaaaaagagagagagagagagaatggattaggccagagaagaagtggtggtgggtgcactgggcagaagaaatcacttgtgcaaagcaaggagggagtgaaactgctttgtacggtggagaacactgcttttgagtccaacacaagctcaggcttggggaaggaatcagataaaaatttccaggatctcagagttccctgtgctccacacgggttggcagacagcacccacatggagtccttctgctcgtaaccagcaccctgcaagcttcccacgcctggaagtggtgtgtttttgatgggaacgtcaggccagaggtctcccagcagcccccagctcggagccgcgctggcagctcccaggccttctcctggagcccgctccctctcctgggggccctgtgagcatctgagcctataaatctctcctgctctgggcctaggattcacaaggctgccaggaaagcctgcctctctccctgaagtagtggatcaacacagcccatctgtctgtccatctcaaaatctttccttaagatagtggaggttgtctgggccggtcccaggaggttctctctgtctgggttctaatcacagggtacctggttcttctatccttcaccctcttttaaaaaatcactttttagtactttgggaggctgaggcgggcggatcacctgaggtcaggagttcgagaccagcctggccaacatggtgaaaccccgtctctacaaaaaatagaaaaattagccaggcgtggtggcacgcacctgtagtcccagctactcggggggccgaggtggaagaattgcttgaaaccaggaggcagaggttgcagtgagccaagatcgagccactgcactccagcctgggtgacagagcgagactccatttcagaaaaaaaaaaaaaattaaactggtttcccattttgctctgtcctcgagtgaatttctccccctgggtggaagctaaaggcacgggtatctgtctgtctccagagtataatggagagattaaagtttgattgcttttttcctgctttttttttctttgagatggggtcttgctctgttgcccaggctggagtgcagtggcaaaatctcaactcactgcaacctccacctcctgggttcaagtgattctcctgccttagcctcccgagtagctgggactacaggtgcctgccgccatgcctggctaattttttgtatttttagtagagatgggtttcaccatgttgcccaggctggtctcgaactcctgacctcaggtgatccacccacgtgctgggattacaggtgtgagccaccacgcccggcctcctttctcttataaatagggacaccattgatttaggtctcactccaagccaggatgacctcatctcaacatccttcccttaattacatctgcaagacccttattctaaataaaatcacaggtgggatacagtggctcacgcctgtaatcccagcactttgggaggctgaggcaggtgggtcacttgagcccaagagtgtgaaaccagcctgggcaacatagcaagacccaatctctacaaaaaatacaaaaattagccgggcatgctggcatgtgcctatagtcccagctacaggggaggccgaagagggaggattgcttgagcctgggaggttgaggttgcagtgagctgagatcacgccactgtacacccacctgggcgacaaagtgagaccccatctcaatcaattggttagtcaataacatcgcagtctgaggttctgagtgaacatagcttttgggagtcacagttcaacccaccctagtgaccttgggcaagttgcctcacttctgaacctcactctccttatttgtaaaatggaggcaatgccagtgcccaccccaggagctgctgagagaattcagtgggtcacttcaacacagaagttcagcatacgcctgcagtgcagtgagtgctcgggagatcggagctgttagtgggatcctaatgcggtggctctttcttttctgtctttttttagctttgtggtcatgatggtttcataaagaacaataccgactctttttctattgaccatttttggtgggatgaggaaaagattgtatgtgttcatagcacaaacataaccaggatagaagtagaatgggtgaaagtaggtcttcctcctgtcccttttctcaatacttcaggctcaggcctgtttgttggttttttttgtttgttttgttttgtttttggagtctcgctctgttgcccaggctggagtgtagtggcatgatctcacctcactgcaacctccacctcctgggttgaagtgattctcctgcctcagcctccggagtaccttggattacaggtgcatgctaccatgcccagctaatttttgtatttttagtagagacagcgtttcaccatgttggccaggctggtcttgaactcctgacctcaagtgatctgcccgcctcagccttccgaagtgctgggattacaagtgtgagccaccgcacccatcccaggtctgtttttagagatagggtctcactccattgcccaggctggagtgcagtggtgtaatcacagctcactgcaaccttgaactccttggctcaagggatcctactgtctcagcctcccaagtagctgggacaaggggtatgtctatcacacatagctaattaaaaaaaaatttttttttgtagagactgggtcttgctatgttgtccaggctggtctggaactcctggcctcaagtgatcctcccatctcagcctcccaaagtgttgagattacaggcatgaaccactgcatcctacctatatatctgtctttttaaaacacaaaaggtataacactatgctacctcatcttttatttttagcttaatatattttggatatttttctgtgtccatccacaaagctctgcctggttcttttcaatggctgcctattttatttatgtatttatatcttatttgtttttgaaacagagtcttgctctgttgcccagcctggcatgcagtggcacgatctcggctcactgcaacgtccgcctcctgagttcaagcaattttcctgcctcagccttctgagtagctgggattacaagcgtgtgccatgacacccaactaatttttgtatttttagtggagatggggtttcaccatgttagccaggctggtctggaactcctgaactcaagtgatccaccctccttggcctcccaaagtggtgagattacaggcatgagccactgcgcccggcctgcctatttttaaatgtgccattatataaacacaccagaattgaaaccccagagctgactagtctttaggccttttgtcttgaggatttcgttcaaccaggccacccaaacatccatctataatccgagggaagagagagagaactgattggagttgggcatagaatctgaggaacgtgcccacatccaatcagttctctcttaagattacagatggaagaaagagtcatctctttcaccttgccttcttcagtcccatccatcctcccattcatattcccatccatccatccatccatccatccatccatccatccatccatccaactcatttaccggcctatacactctgtcctccctcccattcacccacccatccactctctcatccactcactcatccttccctcctccgtccaaccatccgtccaaccagctatatacccacccatctacccatctacacacccttccctcctttcttctttctttcttcctatctatccatccatccttccttctttccatccatctattcgtccacctacccacccacccactcatccatttgtcttcctgtctctctacctgtccatctatccatccttccatccagccatctgtctgcctattcacccagcctcccatccatttatcctcccgtccatttacctatccatccattcttccatccacccatcctttcttccttccttctttcctttcttccttccttccactcacttgcccatccacctcttcttccatcctcccatccatctactcatctatccatccattttcccacccatctgcccatccacccacccacctactcacctactcatctgcttatccaccctcccgtccatctgtctattcatccacccacccacccatccatctacctacccatctacccacccttccattcacccatctacccttccttcctttcttccttccttccgtccactcatcttcccatccatctactcatccatccctcaatccatccatctaacaagcataattcagcacctaccatctatgtgccagtactagagatacaatgtaaaaccaagcctaggagatttttgatgaaatgaagcttgtgagagctgagcactgaactagtaggactgaagccagggagtggatttaagaaatgcttgccactgtggcattgtctaccagcagatatgatgctgggatttctacattgttaggtgaccattgaacgtattggtaactgttctcagatctctctttgggaaggaaatgggtcttcagagcctggctccacctcagaggcctctttaagagtagaaggtgatggataatgtctgcttaatcacatctagttctttgatgacctctgtatcttttgggtttctctggtggtaaacaagagagactgactctgtcatctagtagaggaaagggatttgtaggggagtatggaggagctcacagttgcagtgggaacactaggaatcaggctaggtaaatgacagaaactgggctgcttgggcccaggggcagaaaggaagtctgcctcagggctctgtccacctgctgtgcttccctgtccttgactgagcttggagttttaggccagagagtctgaccaatgcagcctggaacacattcttacctctttgttgaaggtacttatgaggcagtcccactaagactgtacatgacggtaggggtgatgggggaaacctcaaggaccacaggatgcttctggaagaagaggaaatggatgctggatttacaaaaaaacacaaatgtgcacaatactatattacagatgaaggaactgaggcatggagtttaagaatatttgcccaaggccacagagcggagaagtggctaagggggaccccaatctgtatagatccaacatctgcgtttggtccctaacctaatctgggtggggtgggcctcccgggacacctccagagctgatgtggctggatgctaatgactcctggatcagtcaggctccagcatctttctggggctgcctctgggactttggggctgcccttttggctttggtcgtggcccctgtagcctgggcaatgagcccagctgacctgttgtcacttccaatgaggccagcatggagaagctttagaatgggagggccctgggaggagccaagtccagacccttagctcagagctcattttaattcatggctcttttttcttctttctgtttgcagatcgggaggaccagtccattctatgcacgtaagtggaactgctttttcttctgttttttttttgtttttttttttttttaatctgtagtcgagatccaacctatgaaagaaaagatccatgagtgcagagatctttgatttgttcatggttccaagtgcctctctttatacctggcaccatgtagatgctcactaaacatttgtgatatatggtcttctgcggaggcaggcaaacttaaactcttaatgacacctgctatcatttggttccatacctctcctccttctaaaaaactagcatttattgaacatgtactctgtgccaggacttgaactaaagattttatatgcagaatcttatctaattgcataacagccatctgtgttgatagggaagatgttaaactgtcactttagtatttcacatttatcaagccacaaacacatcagtgccatatttggtgattggtatcactgtttctttgaagacctaggtacataggcagaagatagtaactcaattttagaatcattgagagagttttcactattgtatttatatgcaagtaacatatattaatatatattgttgattcattgacattgaactcacagccagcagctctgtggctgatgcctggatgaagtttatctgatgtgtatttattacataatgggtatcacaactttattgtgcttggaaacatgagccaacacttgagcactatgctggggacatttttgtatgtgtgctgccgaagggagcacatctgaggggacattttaaactgcaaaataactaacaaaaagccacaaaaatacaaaaaaaggtggcactaaatacactacagaaaggacacttgtttacagtatgagagttgaaactagaaggtagagcattcccctgttcaacctgagctgggaacgtgtgcattgggggaatcgaattttccttactctgcacatgttcacaaatgactacaaaagtgccatgaatattgattttggggttacaaataactttcagcaggtcggtgaatttgaaaatatagaatatataaataatgaggatagactgtgcatatatatatttacataatatataatatgtattatatttaatatatttatatttatatatatatatatttgaaggtctggaagcaactaaagctataatcaacagaggttatttaaataaaatatagcatttccaggtagccactacaaagagtgaggctgatctatttatgctgagagagaacgctctttatagataataccgttgagtggaaaacacaggggcaaaccagcatatgcataatgtaaccgtgtgtgtctttaaaaagagcaggattgcatggacgtgcatatgtttcctatttgcatgaaattatctggaaggacaattaaaaactagtaattagaatttcagatggtgatggatggtaggatggcaatgaactgtattgagagaagattgaaacaattaataagtttggggttgatatagatagaaaacctggaaacaataaaacaaaggcaattataaactccaggaaaaaacaaaagttgggatggaaggagaagtaatcacattggactaaggagcccagctgtgcaagtttggagtatttatctaaccagaataactccctgtgatggacttggctctgtggggaaagggaagaggattagatgggaactgaattctcatattccatggtaggatgtacacatttgatgtttgacaatgaatagtctggatctagagatataatgctacctagctatgaggatataaatgctaaaacaacctgccgacttggtttcctagttttctggcttctaggggtcacctgcattccttggctcatggtctcttcctccatctttaaatcctgcagcatggtatcttcaaatctctttctctggtccccctacctctctcttataaggcccagtacctttgtggttatattagccccacctagatgatccaagacagtctcctcatctcaagcaaacatattcacagattctgaggataggccatggacattcttgtgggggctgtttttcagctagccacagaggcatttgatcccctaggagccaaacccatgtgtgagccacatgtcatctccccaggaaccaaaatagtgtagctcaactgccctctgttgagtgaatgaattaagtgtggtaacagagaggtgcaggaaagagtaggactttcagatggcttcctagctatgtagctatgcacgggtcacttgacctctctgagctgagcttatggagaggctgtgaagatgaagaagaggccaccctgctctcatttccagcacccatgccatcagcaggtgctgtttcatctaaaacggtgctatccaaaagaactttgtgatgagcacaaagttcacttaaaagttcacttaattgagctcttaaaaagtggcaagtatattgcagaactgaatttttaagattttagttaatttagatagcggttcctgccttggacggtatgatgctgaaatatttctcatctctgtccattcctctgactccaccgcctcttcctagttcagggtcccgtcacctctcaccagggcctctgtagcagtctcttaagctccctgctcccattgcttgcttgcttccttcctttaataaatatacattataagaatattcactcattattcattgaataaatattcattagcatgctgtcataaagtgtggattccagaacctaaccccttgggtttgaattctggccccatcatcgtctagttagttgtatgctccaggaaataagtcagttcacttctctgagcctcagtttccccatctgtaaaatgggaacaataagcaccccattgggttgttggaaggatgaaatgagtcactacatgtgaagaactgagaaacaggccactgccccatggtgagcactttgtaaggatcagctgctattgtagtgaaagtgctcactattttttaaaaatccttcctgcaatccagtatccatcttgcagtttgtttgtttgtttgtttgtttgtttttgagatggagttttgctctcattgcccaggctagagtgcaatggcgtgatcttggctcacagcaacctccacctcccaggttcaagtgattctcctgcctcagcctcccgagtagctgggataacaggcatgtaccaccatgcctggctaattttgtatttttagtagagacagggttttgtcatgttggtcaggctggtctcgaactcctgacctcaggtgacccggggagcctcggcctcccaagtgctgggattacaggcatgagccgctgagcctggcccatcctgcagtttgttgttgttgttgatttttttgttgagacagagtctcactctgttgcccaggctggagtgcagtggtgcgatcttggctcactgcaacccccgcctcctgggttcaagcaattctcctgcctcagcttcccgagtattatgccatcatgcccagctaatttttgtattgttaatagagatgggttttctccatgttggccagcctggtctcaaactcctgatctcaggtgatccacccacctcagtcagcctcccaaagtgctgggattacaggcatgagccacttcgcccagcccatcctgcagttctgattctccccacactggttctaaagtcccgttcccctcgtgaaatggtttcctgcacccatgagaataaaactcagattccttactgtgacttggaagactgagtgtgatctgctcttccctcttcacttcctgctgtcctcctctgttgtggccctccagccatgctgggagccattctgtctcatacctgggcccagcatttccctcccttggacctctgtccatactgtttgccctgcctggcccacccttccctccatccttcccacagggctctcttgtaactttcaaggctcagcaactccctggcttccccatccacagcctcccctctcctcccttcccctcgatcttctcagtcacatcacccagatgtagcaatgatatctccaccacgaactatcttgattatttgtttacttggctattgtgtatctccatctcctggaatgcagcgttagcaaggacttggcacactgcccacacacagccagtgctggagaaggaggccttagccattgttaggaaggaaatcccaaaacgatcagacttttatttgcaaatgcatccagtcagcccagaaccaccaacatcttcagtctctgtattcaattttattttgcttgttgtgaaattcagccaaagtgacttgaaggacctacaagttgacagcagggctgagcttttacgcgtagttggtgcttaagagaagccaggctggagccaactgtttggttatgcagttaagaaactgaaaattggccgcgcactgtggctcaggcctgtaatcccagcactttgggaggccgaggcgggcggatcacgaggtcaggagttcgagaccatcctggctaacacggtgaaaccccatctctactaaaaaaatacaaaaaaattagctgggcatggtggcgggtgcctgtagtcccagctattcaggaggctgaggcaggagaatggtgtgaacctggggggcggggcttgcagttagcagagatcgcaccactgcactccagcctgggtgacagagcgagactctgtctcaaaaaaaaaaaaaaaagaaaagaaaagaaactgaaaattggccacgcaccgtggctcacgcctgtaatcccagcactttgggaggccgaggcgggtggatcacgaggtcaggagttcgagaccatcctggctaacacggtgaaaccccatctctactaaaaaaaatacaaaaaaattagccgggcatggtggcgggtgcctgtagtcccagctattcaggaggctgaggcaggagaatggcgtgaacctggggggcggagcttgcagtgagctgagatcacgccagtgcactccagcctgggtgacagagcgagactctgtctcaaaaaaaaaaaaaaaaaaaaaagaaaagaaaagaaactgaaaattggctgggtgtggtggcttatgcctggaaactcagggccttgagaggccgaggcgggagggtggctggaagccagaagtttgagaccaaactgaggaacacagtaagaccccattactacaaaaaatttaaaaattagctaggtgggatggtgcatgcctgtagtcccagctactcaggaggttggggagggaggatcacttgagcttgggagttagaggctaagtgagctatgatggcaccactgcacctcagcctgggcaacagagcaagacccagagacaggaaggaaggaaaggaagggaaggaagacaagaaaggaaggaaactgaaagctgaataaatgtaatttttaggcctgagttgtattttgtctagcatgtaatccatccagtataatcagtttaattagaggccatgggcctggctggagatagagctgtgtgatcagggggctaaagtaagaggaggagggtggtttcacataaaattagagagaggtaagggggtgcttccaggccctggggaggagtttaaactttcgtctaaaatggatgacaggctgggcatggtggctcatgcctgtaatcctagcacttcgggaggccaaggcaggctgatcgcttgagctcaggagttcaagaccagcctggccaacatggccaaaccccctctctacaaaaacaaaaattagctgagcgtgatggcatgtgcctgtagtcccagctacttaggaggatgaggcaggaggatctcggttcactgagcctgggaggcagaaagttggcactgagccaagactgcaccactgcacttcagcctgggtgacacagtgagaccccatctcaaaaaatatatataacaataaaataaataaatgaaatggatgagaacgtgctaagggactcaagccaaggaaggacaaagtttaaccagtgggtcaaatcaggcccttgtctgtctgttccagataaagttttattgaaacacagccgcacccacttgtttacgtatttgcttttgtgctgcagtggagagctgagcagatgtgacaaagaatgcgtgaccctcaaagtctaaaatatttactgtctgaccttttacaaaaagagtttgctaactcctagcttaaacagtgggaaaatgtgaatattatttatattgtaatgataggatgaatgctgaaaatcattatacaaacaatatataacttctgtggaagcagtggttataaaagtaataataggtgggcacagtggctcacacctgtaatcccaacactttagggggccgaggcaggaggattgcctgaggcctggagttcaagactatcctgggcaacttagcgagaccccacaaaatcaaaaaattagctaggtgtagtggcacatgcctgtcatcccagctactcaggaggctgaggtgggagggtcacttgaacccaggagttcgagattgcagtgagtcaagattgtgccactgcactccggcctgagcaagaagcaaaactctgtctcaaaaaacaaaagtaataataactaacattttggcataccaggcattgttctaagcattttatataaatgttcactcatttaatcctcataagaatcatataaaaggtcaggcatggtggctcatgcctgtagtcccagcactttgggaggctgaggctagagatcacttgagaccaggagttcgagaccagcttgagcaacatagcgagacccctgtctctacagaaaatttaaaaatcagccagctgtggtggtgtgcacctgtagtcccagctacctgggagattggggcaggagtatcacttgagcctaggaattctcagctgcagtgagctatgattgcatcactgcactccagcctgggccacagagtgagatcttgtctcaaaaaaaaaaaaaaaaaaatcatacaaggtaagtgtttttattatacccattttataatggggtaaagaaactgaggtatggagaggctaaatgacttgcctaaggtcacccaggtaactggcagaggagggatttgaacttgagcaacctggtcctggagcccattatgctattctgccaattgatgctataggggagagaggcgttgcttctgcctggggttttgcaggacgtgtaggagttgtacagtacaaaatgccagggtgctttgccagtcacataaagaccagggactgaatagctgtgaggttcatcagagacaatttggctttcctaccagtggcaaaccacaggctgcaatggacttggcaatattcgaccctgggagccaggaccagctgcagaatttgtagaattttgcaaaatgaaaatgctggctgagtgcagtgactcacacctggaatcccagcactttgggaggctgaggcgggcagatcacatgaggtcaggagttcgaggccagcctcgccaacatggtgaaatcccatctctactaaaaatataaaaattacccaggcatagtggcgggcacctgtagttccagctacttgggaggttgaggcaggagaatcacttgaacctgggaggtagaggttgcagtgagccgccatcacacactgcactccagcctgggcaatagagcaagagtcagtctcaaaaaaaaaaaaaaaaaaagaaaagaaaaaaaatgcagagcgtttataaagaattaggaagaatttccagatggcaacattagagtatgaagcacagggtggtccctgtgagacggtacaggtcacactcatgaagccagcctggctgggggattaagtggccattgggtggttcttcccagctgctggggctggactgattaaaaggacttggcactggggtagttacaaggccaggaggccataacgtggtcatgagtctggtccttctccgggaagagggagctcagtaccaaattccccaagaaataagaaaggagtttagggtgctcagaccaggaaggcatcttcacccctagaggtcaggggtcagaaaagccaagctatgaatgtttctagaaccagctctaagcacatcaaccttcagacgcccacgagcctggagcttgggatgttttctttggcagaacctcccagggcaatttatttttctcaacagaacttggaaacagtggagcccagcagcaacatgggaaggggtagatgcccagagtttatgtcccactccccatcccaggcaaagtgggagaccatagccacggatagggcacattgatgtctttgtttttttttttgtctgtctgtttgtttgtttgtttgtttgttttttgagatggagtctcattctattgcccaggctggagtgcagtggcacgagctcagctcactgtaatctccgcctcctgggttcaagggattctcctgcctcagctccccaagtagctgggactacaggcacccaccaccatgcccagctactttttgtatttttagtagagacagggtttcaccatgttggccaggctggtcttgaactcctgacctcaagtgatccacccgcctcagcctcccaaagtaccgggatgacaggcgtgagccaccacacccggtgatgtctttgttgtaaaagggaggaggtgagagaggttcaaggccagggtggaaaggaaggaactattgtgggaaaggagaagtgagcagcagcagtctaggagcactggtttgtcagcatgaagagtgtgatccacacatgttgtttgtgcacactgctgtcctgattcttgtcttggatctgaataggttcatgaccacctacgcaagtggtttcctacatccaaaaatttctctcctttctcttgctttaatcagaatccaaccccttcactttagaatgaagtcaagcaaggttctgacgttagcctgattgaagtaattcatacttaggtgtgaatgactgagtggcttggttcattgattggggcaagtaaagcctcctggaatatatggcagaattccagtggagtggggctgggacttcactctgtcttttctctttgctgatttgttaaaataaaagggtaggaggcagaacatgggccctggtgtcaagtggacctacgttcaaatcctgcttctcctccatttcctatctgtgtgaaagcaggagcaattgtgggctggagcaatttacttcaaacctctctttgcctcagtttccccggatgggtgatggggataattaataactctctcattagattgctgggtagagtaaatgaaaagatctgtgagcccaaagcctagtactgtgcaggccttcaacaaatatcaattccccttcccctgcccttcttctggccttagaaagcaagtccctagagggttgggcctgtgtcatggaacaacttggtgaaatgtagtaaaaggaattctgactgcattagaatcagagacctgactttccattctgactgtatcccttctttgctgtgtgacctagggaaaattgcttacccactctgggcaagactcttccttctataataacatggaagcaggaagaggataaaggaaataattcatgtagagcatttagcaaagggacccttccccctatatccccccaatgacaaacgccaattcttctctgtcttaagagatgggatcttgctatgttgcccaggcttctctcaaactcctggcctcaaggcatcctcccaactcagcctcctgagtagctgctattataaacgtggccagttctctgctgcacctggccagttctcctcttttacacacacacacacacacacacacacacacacacacacacacatatattctggtcttagtttccccttctggggaaatggggtaatgccttcatggtccccatttcataaactgcctctgaggccatgtgaaataatgtggccattgggaaggaaggcctctaggaagggaagggaccacacaaagtcaccgcaagatgtttcatcattcttggccatcagacacttgatttctggacagtgggacctgtaggattaggcacagcaatttggggcactttttttttctttctctttcttttttcttttcttctatttcttttttaagccatgagccaagttattaatgggcctttggcagagaaaattaatttctttatttcctaattaggaagaagagcagagactgtactagctttggtggcactggttcagcacagagaaccttgggctgacctcggggtgaacaaattcttttttcaacttaaaaaaaaaactctcttatattttagagtattaagtgagctcagaaaataaaagagataaggcaaagaaaggaaacacaaaaaacaaaagtaaactgaaaaatagaagaagacgataaacaagtgaagttttggtcaaggcactgtccttatctttcactaggagtggtggaacatagaggcagtatctggatggagcggttccattgtgatgatttctggtggccaaaacaggcagctagtgcacgaaagccatcttggtaaaaaaaaaaaaaaaaaagatctaccttcatattccaggaggacatacttttttgatacgacaaaccatgtcgtgctgatctaaacatatcagtcatttacactttagtgtgaattacttcaactgggtttattcttagatacttggctgagatcatcagccagcttcctgatacatggggtgggattcctcagaggataaaggggcttgcatctgcccagtgaccaatgggataaccggttttttggtaaatttttctttccataagggagcttcttaaactttaggtcctggtactccagaggcacttacatcctttcttgaaggctgccttgtgcctggtctttccatttctagcaatgctaatgatgtctgcaggcggatcacgaggtcaggagatcgagaccatcctggctaacatggtgaaaccccgtctctactaaaaatacaaaaaattagccgagtgtgctggtgggtgcctgtagtcccagctacttgggaggctgaggcaggagaaccagggaggtggagcttgcagtgagctgaaattgtgccactgtactccagcctggggacagagtgagactccatctcaaaaaaaaaaaaaaaaaaaagtagataattccaaataaacctgtttggacctatgtaagaaaactaaggttttcttgttcactctatttttttagagatgaggtcttgctctgtcacccaggctggagtgcagtggtgtgatcatggctcactgtggcctcaaactcctgggctcaagccatcctcccacctcagcctcctgagtagctgggactacaggcatgcaccaccaagcctggttaatttttcttattttttatagagtcagggttgtgctgtgttgctcaggctggtcttgaactcctggactcgagtgatcctcctgcctcaacttcccaaatagctgggactacaggcatgtgccaccatgcctggctaatttttaaatctttttctagaggcagtgtctctctgtgttgctgagctggtctcacactcctgggctcaaatgatcctcccacctcagcctccccaagtgctgggatcacaggcatgagccaccacatccggcccaccttttcactctttgtatctgaattcttttctatgtcctcttggaaggaatagattgggcattggacctaggctggggacccagttccgctcactaccagagatgtggccttgggcaagttacttcccctctgggagcctctgtttcaccctctgggaaatggtggtgatgatcattattgtcctgcctggctcatggaactgcggaaaggtcaccatggaacgtgtgcatagatgatgttcccgtgtctttcagaggcgagtctggagccgggaaaaccgaaaacaccaagaaggtcattcagtacctggccgtggtggcctcctcccacaagggcaagaaagacacaagtatcacggtgagtggcagttcccaatcagaggccatgatttagccaaccggtctccagcttgcagcccaaccgagatacaaacagaacatcattgcaagaactcaggccccatctgactacccctcccctgaagactcaaagagggaccgtctttttggcgagcaggcctgttgagtgtgggtgatttcttggctcagctagaagcatccctccagaagggggcccgttttgtgaaatgagaataagccctttccttccatagcgagatcttcctccacgtcggggcttctcagtggtggcactgatgtcattttggaccagataactcttccttggaggggcttccctgtggctcgtagaatgtttcacaacatccctggcctcgacccgccagatgccgacagcccccttccctccagttgtgacaaccaaaaatatctctagacattgtcagatgttccctggggtgggacagttgcccttgattgagaagcactcctttcatgaatctctgtaacgtcccaggggttaaggtaccttttgggttcccggattcctccacgtgtccccctgtccctgggatggagatgctggtatcactcggcccgtgggcttcagtgcaatgccattcagtaactgtggattgagcacctactgtatgccaggaaccacttggggtggggacctggggataagtctgagagatgctgttattctcttctctgagcttccagacctgtggaagagcatgtagttgtcaaagaatccctcaaataaacagatgatgacacggtatgactaagagcttgggaggaaaagaagagcaggtttctagagtcatcacctctagggcccatccttctcttcctcctcgtgtgtcagccctgccccatctatcccacaggagggggcacgtggtagggccgctaggactggccggtgcctccgtctgcaggtttgtgggtgggaagatggtaggatggagatctgaccacggcatggggtgtctccagtgttcgccattccagatgtcactttgcgtcctcagaggggactctggggcagccaccatggccggcttgtctggaggcccttggagatctaggatgggcgctggtcgtggctttggagaactttccttctccaaacaaatgcaggaaactcaagattcagcatcctagaattgtctctggcaagttggtttccagccatagtgagtgggaacaatggccccagaggctgtgtggcagtttaaacacagtttccactgccttccctttccctaaagagtaaacacaggagataatactttctaacaactcatcgttatcaagggcctactatgtgctgcttgttttggctgcatgcgtaaacacatctcagacattgtctcactggatactgttttaaggagcctaatgtggccccagtaattatgaaaacctttgaaatgtctggatctctaagaaattagaaaaaggagggaatggctgagcatgggggctcatgcctgtaatctgtgttttgggaggccaaggtgggaggatggtctgagcccaggagttcaggaccagcctgggtgacatagtgagaccctgtctgtaccaaaaaaaaaaaaaaaaaaaaatcaagagaattagctgggcctggtgtgcatgcctgtagtcttagctacttgggaggctgaggcaggaggattgcctgagcccagtaggttgagactgcagtgagctgtgatcgtattcctgcagctaaacagagagaaaagaaacagtatcaaggaaaaggagctgaccagtctgtctgggagactccaggctgtttggggggatcaaagtcatatattctccagcccctgatgtccatgtgatggaaataacgctgacatttgttttatactgtgttgttcaaccacagcaaggcccatcttttgcctacgtgagtaactgagagtgttttcctggtgtgtaggggaggcacggagtgaacttagatctgcatgatcctcttgcacccaccgagtcccgtagctggtggtagaaatggggtaggccctagagtttcacaacttaaatcagtaaatgcaccaaaataccatcctgtgggtgtctgatgccagggaagggtgtgggggtgcatttaccacccacgggacgcctattggagtccccagggttgcgctccagcctgaaatggatttctccggttcagaatgaacccctgcacccttcaaagcatccgctcctggtacccttgactggaacaacctagacagagatgtctgtcccatctggctgagtgttttaggactgtcaggccccaaagcttccctggctcgatggacagtcgatggcacagctgtggcatgcctccctcttctctccctgccatcatccctaagtgtcttccctcagccctgtccctggtgcaccagtgtgtccctgtgcatgcgtgtgcagtgcgtgtctgtctcttgcatgctggttgcttgactcaagcctccagaaacagtcttggaggtcgcgatgcactagctttggtggcgcggtaaggccccagctacgcaacgcataacctggtcctgcttggacctgtgcatatgtaaactcatctctaacacagagcttggggggctgatgtgtgggtcccagcctagaagaaacccacaggtgtcttccttggctcccgaaaagatcattcaatccatcttagttagaccctgggtgactgtgttgcagatcagaaggagaattacagttcttatttgggatctgcttttgtgtgaccttggccgagtcagttaactcctcggggctatggtttcatcatctataaaattgagggtttgaaccaggtcccccgatttaaagctctcttgccaagacttttcaaccttacctgccagaatccccattctagaaagggagcctttttcagagagcatggagaccccaagtttatgtgaacaaaagtgattcctttagtcgtcttcccaccaacaaagaaatgcccgtggtgctccttgtaaatttccaccagtctcagctgtggtgattccacttgtagctgagatttgtatgcggatgaggcttttgcttcatctttctctgggagctacaaaaaggaggatgtgtggacaaatcaaaacagaaacaaatagcagcttcctgctttgtcctgtagaccaggtaccctgatgccttcctagcatgcggaggaatgaggaggaagccatgcccatccttgtcccctctagacactttcccggctcctgtccagcccagccctgatgcctggaaaaataaggaagggaaagcaggaggggaggacaaggagaaaaactcccagaatccagggcctggaggcctcggggcccaactgcagccgccatgttttagggctaggccaagagcagctcgtttgctttcccagcttaacttaccacattggccctttcctgccatgattaatcacgtgaccgcgtttgtgcaaaggcatcccggcagagggggccggtgggctgtgtacagtctcagcttcctttaacccaatgaatggagctcaggcaacctgctttgaagctttattccgcagtccgctaagaggattcctggtgggttttgtgcattccttacttgtctgctgtagaagacttcagaaaaccagtcctgagaaagaaaaaattgcaacttaaaaaaaattgcactaaaataattagaaggaggcttgtagtggtttaacttgaagaaggctgcttgttaaacatgaacagcagcacgactgccatgtacagtgggacaggtggtgcactgcacaactccggggggcaccattcatcatgatgtaaatgacatcaccgacattgtgcaaggcagtggctttgagtggcagtgatgttgcacagatgagcaggccctggtcttgaaaaaagtgaccttcctagggagcagatgtcctagctattagagagctcagacagttgcttctcttctgaaatcctcctgtaaatctgaacattagcatcagggtctaagaggaggtaggagataggagagaacctgtgggttaagggcagagttttgtgacaacatccatccaaggtagaactgtcaggacctaggttgctttctccaataactagatgtgaatgaattttagggagagctggaaaagcagcttctacaagcaaacccgattctggaggctttcggcaacgccaaaacagtgaagaacgacaactcctcacgattcgtaagtagcaaagccacatggattttccagaaaagctttggtgtcatctcctgcctggggctgcagagtgtttgcgtgcagaggtgggaggggcatctgaccctggagagatgggctgtatctcacaatcttgcaagggctcctgcctctcactctctcattcattcattaatttattcactattcactcaacaaatattgattggcctggtgcggtggctcacacctgtaatcccagcactttgggaggctgaggtgggaggatcacttgagcccaggggttctagaccagcctgggcaacaaagcgagatcccatctctattattaaaataaaatttaaaaaattaggtattgagcacctggtatgggctagacccttatatccgataccattttatgtaacaaaacatgaattgagtgccaactgtgtaccaggcacacacctcctccaagaaatacttagtaagtacctactgtgtacaattactctggtaggcacttttacatgtaccaccattctctttgtttttttctcatttgctgtttttattaagtgcctactgtataccaggcactcagcgagtctcacaggattgcgatgaatagttcagatatggttccagccttcatgaagctggttcttccaactgaataacagagagtaagtgaggcagggggtactaccttcccatgcacactcccccaggctccaaagcaaaaagtttttgcctgagcccaacagggcaggggaactctgaaagtggatggttgatgataggtagacaacaatggttttattgtgcaaaagaagcggttgtctccgtaggagggtcagaaagatattttagtgagaaaagatgaaggaaaaattgcctctgcattccaggagaagggggtctctgaactgttgctcgctgagatggggccctgtgaaagactctttgcagaaagctctgctctgctgagcaaatgcacatggtggtccctgaccctgtgatccccaaggcccattttagtaacaaacaattacataatgtctcctttcctcgcccgaaattagaatcatagatagtatcacctcctacacgtattagatgaatacacatcagcataatgccctaactggaatatgaagaagaaataacataagacaattcataatgaaagtgtgcatttcaggccaggcgaggtggctcatgcccgtagtcccagtactttgggagactgaggcgggcagatcacttgagctcaagagtttgagaccagcctgggcaacatggggaaaccccatctctacaaaaataaataaataaagtgcatttcagcatatcaatgctcgggccaggccacaccaacagaagacacagtaagagacagacacttaggtctatccacggcgacagctacaaatacaaggaaaagggtcaagttcaggcactgatgatgttggcatgggattttccagaatggcaactgactctcagtgaagcgctgaaccaaagaacaatcttctctagagtcacacagatgggatattcttgtattagaacaacattttaaacacttgttaatgctttcatttaaaagcataaaaatctagaccaggcacagagtggctcacacctgtaaacccagcaccttgggaggctgagttgggaagatcacctgaggtcaggagtttgagaccagcctggctaacatggtgaaaccctgtctctactaaaaatacaaaaattagctgggcgcagtgacacatgcctgtattcccagctactcgggaggctgaggtgggagaattccttgaacccggggagatggaggttgcagtgagccaaagtcacaccactgcactccaacctgggcgacagagtgaggctcttgtctcaaaaaaaaaaaaaaaaaaaaaaaagcgtaaaaatctaaagtcataaaggttaggttctaagcctggctaattacaaacagatttttacctccatgagtggcaggtgagacattggaagagtcataagggatatagacaaggattggcatcagagactctccaggtcattgcaggactcccaaaatatccttggccccactgttcactaacaacagcggcccccccccaacatgtgacaagccaaataatggcttccaccgatttccaaaatctccatagcagatgtgccgcctccactgagaagcactgcgtttgcatgttccaattctgtgcaatgtttctagcctgtcataaatggaagcacgtgcaagacaaatccctaaaaacatcctccactcactggcgtccctgccatcttgggaaggagagtgaagaaggtgcctgggccttgcctgtgaccagccggctctccctggctccatctgggatatggtcatcccaaatcactctactgcatgtttcccaatggggaaagtttgaaggttttgtcaaggactgagcaagcctaggggattgtgtccacacacgccaacacttcccaccatgttatgtcatgatgggggaaaaggatgaaatcctgtctcacctgttgaggaaacaggaaaagggttcatgccaacagatggaggattgggttccatccttggtttcatggcttagctgaggcaggtagatagggccatctttggagatacttgttgagcctctagggccaggaacatgagccattcctgcctaaaggacatcctacacagggcctgcttgggcagtgtggccaatgcatactcacctgtcccacagaaaaggtttaatccatagttggatgatgtggatgttttggagcagggtggggtctggggagggagccctctagcccctgaatatggaaaaaccttctttctgcttagggccctacctctcaggagcaacgtcacgttggacaagtcacttgatctcttttagccttagttttcccagctttaaaatggggatagtgggctgggtgtggtagtttactcctgtaatcccagcactttgggaggctgaggtgggaggattgcttgagtgcagcagtctgaggccaacctggacaacacagtgagatcctatctctacaaaaaaaaatttaaaaattagccagatatggtggtgcatgcctgtagtcctagctgcttgggagggtgaggtcatggggaaaaggggattgcttgagcccaggagttcaaggttacagtgagctgtgattgcaccactgcactccagccctcgctgacagagcaaaaccttgtctctaataaataaataagtttttttaaatagggatagccatgatggactacggtcattgcaaaagccgaatgaaattgatctgtgaacatgttttacacgttctgttgctgtcaggcctggggtggtttcagctcagcagatgttggttccgcctgacaacttgacctgtggggttctgagtgttcgcaagaatctccccgccccacctcccatcctctgtaccatctgcctcctgcttgcccacagcatggggttaacggctgaagttgggcagcaaagcctgaactgtgttttcctgttggcagggcaaattcatccgcatcaacttcgacgtcacgggttacatcgtgggagccaacattgagacctgtatcctttccctgagcctgggccaaatgggtacccctgccccctaccaatctcctgcccagaggctgggagagtccaagagccacctctatctttccagcctcttaggtttcttccagaacaaatctccccttaacagcaggcattgtggtgcagtggttatacatgtgtggaccggacccctggtttgaaccctaaacaagcagcctaggctgcatgtgatgctcaaatgatctgtcccttagctgagtgaccttgggctggttactccacctctctgtgcctcatcagcaaaatggggatgataatgaatggtacctgcctcatagaaatgtgagaatagagtgaatgaactcatataaagctctaggcaccatgcgaggtgcagagtaagggctggctacgtagtgtctatcgtatgatcttcacttcatccttattcagccattgtccgaggccaaattctggacctgtcgtcctcttagagagttggtctgtgatcggctccacttcttaggtaggaaattgatgaaaacagagtttacccagaagaatgctggtatcgcaaggaacaagtagagcatctctttcatgaacctgagcggtgaagtggagccaagttagaaatttctggacgtgggggaacaaccaggtctagagttcagtgactgatcagcctcaggagctttgcaggcggccctagggctcaggcttcctgtggaacacgtgcttggcaatgtataggacctgggggcctgacttagcttctttctgcacctgaggtcctctagcagcacctagtggtcccatttttccacgttatgtgccctggataagagggtgggttgtggagtagcttcctctccactgtacttgtctaagctgtggggatttgggaaaatcactgaagctctctgggcctcagttttgcctcggtaaaatgggggtgattgcacctagtttctggagctggtgcaggggttaaatgaaataatatgcataataatatgcacagcccttggtacggtactgggcccaaagtgagcatctcataggtggtggctattgcgttaactcaatgttttctacgtttctactttaatctgcccaaaccagccaggattcccatcctgcagctaggagggctgtcaggcttcggtcaagtccagagccagggccctcttgtcctgcagccctgcacacacctctcagcaattcatttcctgtgtttagagcgagccccaggcatagccccgtccttctggcctcagccttccttttagatcagtggttctcaaagtatgtttccaaaccagcagcatcagcatcacttgggagctctttagaaacacacatctcagccaggcacggtggttcacgcctgtaattccagcactttgggaggccgaggcgggcagaccacttgaggtcaggagttcgagaccacctggccaatatggtgaaaccctgtctctactaaaaatacaaaaattatccaggcgtggtggcatgcacctgtagtcccagctactcaggaggctgaggcaggagaattgcttggatccgggaggcagaggttgcagtgagccaagatcacacactgccctccagcctgggtgacagagcgagactctggctcaaacatacgtgcgtgtgtgtgtgtgtgtgtgtgtgtatgtgtgcgtgtgtatacccatgtacaccatgagaaagtctgagaatcactgctttccagattggacatgggctgtggtagcccgggcactgctagctggctttaggacttgaagaagacaaggtctgctgatctagccccatcatcccgcaccatcatgcttagtgctgtggaaatccacccagtacagtagcccagcctcccagctgccctctcccatcaccccggaccctgtgatctccatgccaccctcacctgccctcccctctgctctccctcctgccaccccgcatcgcggagaagctctcctgaaattaattagtgtggcgtgtttacggtctctctcgcctccatcccgtcagaccccactcttggaacagagggcatggaagacagctttgccacttgttagctgtatcatcttgagaaaggacttctcttctctgagcctcagtttccccttattgaaaacaccgataatagttgcacttatttcctagcatactttgtgaggcttcagtgagacaatttatatcaatcatttcacacaggaatgaatcataaatcataggatcatagatggtgtcattatttgtattctgtcatgtctgaagacagctcattttaaagaagatttgctggtgatggctgttaggggaacatctcgttaccattaccttcttcctggagcctttttatgctttttcttttcactctattcccctcccttttttttgcatctgaagtctgctggcagcacccagcggttccatttgtccataggggcaatggtcaaagttagacattaccgatcccaggggtagaactggaaagtcatcccatgtgaattgggtgtgacagggatggaggtggaagaccagaggaacacccgcagtatccccagaatccctaactccctccaaaccagatctgctagaaaaatcacgggcaattcgccaagccagagacgagaggacattccacatcttttactacatgattgctggagccaaggagaagatgagaagtaagtgactagcaatgacatgtgattggatggcttgagccttccctttcatcagaatccggggttaagggattggctattaaaacagtctcagatcctgccagaaaggaccatgtctgtgagtgacatatgaacagttcttcatctcctcccaatgagtgagtgtggcttgtgttcagtcattctcatttactgagcacctactatgtgacatagtagccatcaactccaattagacattagatcattaatgattcatgtctcattagaccagagagcatcaagtccaactagacacaatctacgccttcaaggaaagggagaaagacatttgccttacttgccaatttataaaacttgcaaatataaaagatgcattctggttttataaggaatttgcaggggcagcaggactaagcatttttcattatacatgttttgccagtgactttgtagaacaggggtcaagactttttctgtaaaaggccagatagtaaatcttcaggctttgcaggccaggtggcttctggcacagctattcaactctgccattgtaatacaagagcagccacaggcaatatataaaccaatgagtgcaggcaacacataaaccagtgagctcaggcaacacataaaccagtgagctcaggcaacacataaaccaatgagcacaggcagtacataaaccaatgagcacaggcagcacataaaccaatgaacataggcaacacataaatcagtgagtgcagatgcatcactgtgttacaataaaactttatttacaaaaacaggcagtgtgcagaagtttgctgacctctgttgtagggaaaagtttttttatgtaaatataatacactgtataccaaactccagtaggaagttatgagttctggacctgcagctgtttactaactcttaaaaatatatacaaatcgcatagcttaaaaaaggaatggatcagtgactatctgtacatagtagagtctacatgttagtaataagttttgagtctgaaattctatgggaacaatacagactttgcttcccatctcttttgtggcccaaggttagttattttggttaagacagttaccaaaaggatctgtgtgagctcagaacttcgctgtgtcggagtgtattgtagacctcagctactagggggtggcattatccattatttaaatttccagggtggggcaaagtggctcatgcctgtaatcccacactttcggaggcagaggcgggcggattacctgaggtcaggagtttgagaccagctcggccaagatagtgaaaccctgtctccccaaaaatacaaaaattagccaggtgtggtggctggcgcctgtcatcccagctacttgggaggctgaggcaggagaatcacttgaacctagaaggtggagtttgcagtgagctaagattgcaccactgcactccagcctaggcgatagagtgagactctgtctcaaacaataaaaataagtttccttaatggctggctttcaggaacataggctatgaggtggagcaatttttggtaaagggggaatgctgaatggattttttatgtaccagcaaacatggtatattagcagttacagtgcaggaccctgtggaatgggccagggaaaaatgttgacattccttttccttttatttggcacccaagaaaacagtttggttgtttggtaccttgggttccagttttgtgctttgcctctggtcttccagaaatgggcaagtatagggctcagaactaaattcccaggggccgtttgtattctagatgatagaactggaaagatgttaggcttttagaaagaaccaaatattgctaaatgcatccaaactcgggataatgaagtcttggcaaagacctcaatcctcgtgacttgaatcaggcatttcaagttaatccaaaagtttgagttaactggtgccttcagtcaatttaacctcgagtttatcaagcagcttccaagtgacttgacccataaaagaccttgattttgaaagaaaaatatcttgctgacgtctctccaaaagtataaccgaatccatcctaattaaagattgatctggaagaggatccttgatgtattggagggtataataaaagcaaatggtgcaggagaaagaaaggcaattataaagttgggggtgggggagaagctgaacaacaacaaaggaaatgtaatcataggatacagtttgacacagaatatctaattaatgtcataaaaagggagttggcaaactgtttttgctaaagggtcagtagtaaacgttttagactttaaggaccagatggcctctgttgcaactactcaactctgttgcctagtgagaaagcagccatgagaaataaacaaggacatcagagcagctgtgtttcaataaaactttatttacaaaaacaacaggggaccagatttgccaacctgtgatataagccttatatattgattcaactaaaaatagctgggggtggctgggcacggtggctcacacctgtaatcccagcactttgggaggctgaggcgggtggatcacctgatgtcaggggttcaagactagactagccaacatgatgaaaccccgtctctactaaaaatacaacaaattacctgggcatggtggtgggtgcctgtaatcccagctactcgagaggcaggagaattgcttgaatccgggaggcagaggttgcagtgagcagccaatatcgcaccactgcactccaacctggacaaaggtgaaactccctctcaaaaaaaaaaaaaaaaatagctggaggaaaggaaaggtagtataagaaagctgcatttttgcctaccatagcaggaagtcactagatactatctaaacttgacatatccagaaatcgcctattacagcgattgtgctttgcctctggtcttccaataggccaaaagcacctgttacttttggcactgaggactggtttcctggaagaaaagttttccacagactgggcgggcagggttggggggatggtgtggggatgattcacgtgtattacatttactgtgcactttattattacattgtaatatacaatgaaataattatactagtcaccataatgtagaatcattgggagcttgttttcctgcagtcccatcggggggtgatgggggacagtgacagattatcaggcattagagtgttataaggagggcacatgtgcagctcacgatagggtttgcgctcctatgagaatctaatgctgctgctgatcttatgggaagcggagctcagacagtgatgcaagcgatgggcagcagctgcaaatagcggataaagcttcacttgctcacctgctgctcacctcctgctgtgtggcccagttcctaacatggaccggtactggtctatggcctatgggttggggaacccttggcctatgatatgtaatacataatggtatatacattataataggctagtatatatagcaagcctattgtacagagagatagtggtaactgccagataaaaagcagctaaaagagataaaagcaggtattatggagtaaggtagagttggagaagggatgtgacaggagaatgctatttttcattataaacctttggtagtaattgatttttaaaactcatgtgcctgtttgaatttgataaaaattttataaatacatgaataaggccaggtgcggtggctcacgtctgtaatcccagaactttgagaggccaaggtgggtggatcacctgaggtcaggagttcaagtctagtgtggtcaacatggtgaaaccccatctctactaaaaatacaaaatttagccgggcgtggtggcgggcgcctgtaatcccagctactcaggaggttgaggcaggagaatcgcttgaacctgggaggcggaggttgcagtgagccgagatcgcgccactgcactcctgcctggacgacagagtgagactccgtctcaaaaaaaaaaaaaaaaaaaaaagagtaaaggttgatctaactcttctgacagctttgtctctgaaggctgaaggcagggtgcctctagacaattgaggtaaaggcatcccttcctccaggtaaatgtaacttcgtgccagggattgtggcttagcaagcagaaccaaggctggatatcagctgcagtcactggagcagtgcacaacctgcaccgctgtgtaaggctggcagtggttggtgaggctgtctacgtgacgatgcgtgagggctttaaacggttcaagccttgataaagggaaaggaattatgatggcccagacccttgaccagatctcggtctcatgttgaaattagaagtatgtcttattgaccctgacctgtcttcctctccttctaggtgacttgcttttggagggcttcaacaactacaccttcctctccaatggctttgtgcccatcccagcagcccaggatgatgagatgttccaggaaaccgtggaggccatggcaatcatgggtttcagcgaggaggagcagctatgtaagcctcacaccttgagtctggagggtagcttgcctggataccagtggaacctgttaagaactcttctctggtcaggacagatttctgctctctgaattccccaccttccattaaaaaaaaaaaaaaaaaaggaggaaaatgaattttattctaggtggtttgtttgtgttgtagaaaagtggctgtataactagggttgcaagtaacccgagctggcttaaaccaaagggaaagtgactaactcagaatgttgagaagttcagggaggttaggcacagtggttcaggtctgtaatctcagcgctttgcggggccaaggtgggcggatcactttaggtcaggagttcgagaccaacctggtcaatttggtgaaaccctgtctctactaaaaatacaaaaaaaaaattagccagggctggtggtgcacacttgtagtcctagctactcaggaggctgaggtgggaggattgcttgaacccggaaggcagaggttgcagtgagccaagattacaccactccactccagcttgggagatggagctagactccatctcaaaaaaaaaaaaagttcaggaattcaagcttcaggtacagtgagatctaggtgttcaaaagatttttctagaacctaatttcttgtcttctatctctctcgactacattgtttctctataggatgcagtttgttgacagcaacatagctgggttccagcccttatattctttgggtttatgtccaaagaacagagtagattcccggcttaagttcctgaatggagtgtcattgactctgattggttggcttaggttgatatgcacattcctgagctatgcagcataggcagggttgtggaaagcgcagggtggtttcattatggtccctaagaatggattcttggagctgaaggtagagatgttggcctcatcaggaacatgtgggcagggtttaggggagggggagtgatcgaggcagtggatttactcaggcttttcctggaggggttgctctggtgatcaattgatattgatcaaaatcatccaaccaatggccaagaaacacactgggtcttgagaacaggacagctcagaaagaaattcttggtcgggacactgtgtttccagaaacgattttccttctgcgttagatgtgcctcagtgttgaaggttaatctctttcaggaacaccaggacagaactgtggaaagtttcccttccttcccacgcctacgcccgtttggagccccagaatagcactgaggttgctgaaatgctgcataaggggaggggcagctcctccgaagataacttggggtctggaaaattaggctgtatgggtcagttgacaaatggatggtgtatgtgggtcttggccagggtcccacatcagaatctagtgctgatagcctccttgtctgaatgacataggccctccaagaatgattcatttcatttgggacaggggtcagttttgcttctaatcttgcttttaaataacaatgaacaatggttaagtatttgctgtgtgccaggaatttaccaaatccttttttcttgatgtactacactgttcagtatagttttatttaaataataaaaaactggaacaggctgggcacagtggctcatgcctgtaatcccagcatttggagacactgaggcaagaggattgcttgagcccaggagttcgagaccagcctggataacacagtgagactctgtctctacaaaaaaaataaatagaaaaaaactggaacaaactaaaataggttgattaatagagggtttattaaatcattgtctgtccttgtgaaagaaaacaatgagaccatttaaattgttttgctgggcatggtggctcacgcctgtaattccagcactttgagaagccaaggcaggcagatcacttgagcttgagtttgagactaacctgggcaacatggcaagatcccttctctacaaataatacaaaaaattaactgggtgtggtggtgcacactgtagtcccagctacttgggagactgaggcaggaagattgcttgagcccaggaggtcgaagctgcagtgagccgagatcacaccactctgtcacctaggctggagtacggtggcgcagtctcagctcactgcaatctctgccttgcaggctcaagcagtcctcccagctcagcctctcaagtcgttgagactacagacatgtgctaccacgcctggctaatttttgattttagggtttttgttttgttttgtttgagatggaggcttgctattgtcacccaggctggagtgcagtggcacgacctcggctcactgcaacctctgcctcctgggttcaagcaattctcttggctgagcctcctgggtagctgggattataggcgcccaccaccatgccccactaattttttttgtatttttagtagatactgggtctcgccatgttggccaggctggtcttaaactcctgacctcagatgatccacccatcttggcctcccaaagtgctgggattgcaggcatgagccaccgtgcctggcctggggttttttgttttgttttggtttgatttttggaggggtgggtagagacaaggcttcaccatgttatccagtattctctggtcttgaactcctgggctcaaacaatcagcccaccttggcctcccaaagtgctgggattacaggcatgagccaccatgcccagtccccagtgttctcaatgtactttggcacttgtttcccctttaaccacagagaccagactccaggcccagcaccttcggcagccccaagcatctagctagaatttggtaatactgttttccttgtatttatatttataattgccatctatttatggcaagtgaagatgatttgtcactgaagatagagaaagttttctattaaaacaaatgtaaggaaagagaaggaagtaaatttaaagaaaatgattaagcaaataatggagcagatggtacacagagcaagcattcagacgatggcgtgcaaatgacgaactctcataggaaccaacttagtcctaaatgtacaccaaccccatttataaaccaagagctacttccaaaccctccatcaaggggcctatggagaagggggtgggtcaggcttcaggctggagcttcatgaggctccaagtgaccaggggacaccaggattttccccaccacattgggttctgcagccttgaactcctggcctcaagatatcctcatgcgccaccatgcctggcctggttatactgcttctaatgtattttgaagataaaaaataaaatcacctaaattgtccatcctgtgtatccctggtggtacacatgtctgatgttggaaagtcctgtttcttattcctcagcaagaagagaggtgtaaggccactgtaaaaaattagcacaaacttgatgccttaaaacaacaggaatttattctctcccagttctggaggccagggttctgaaatcagggtgtcggcaggagccgggcataatggctcatgcctgtaatcccagcactttgggaggccaaggcaagaggatcgtttgaggccaggagttcaagaccagcctgagcaacatagcaagaccccttctctactaaaaatttaaaaaaaaaaaatttttttttttttaaaagacaagatgttggcaggggttgttcctcctggaggcactgagggagatctgttccttgcctctgtcctggcttctggtggctctggctgttcctggcttttccttggcttgtctcactccagtctctgcctcatccttcatgtggcattctactctgtgggtcttctcttctgtccatcataaagacacttgacattaaatgtagggcccaccaggttaatccaagatgatctcatcttgagatcttgtacttgattccatctgcgaagaccgattttttccaaaataggccacgttcaggctgggcgcggtggttcacgcctgtagtcccagctctcagggaggcagaggcgggaggatagcttgagcccaggagttcgagacctgcctgggcaatatagtgagaccccggtatccacaaaaaggaaaaaaaaataaatgtaaccccccaaattaggccacattcacaggttccaggtggacatattttagaaagaccaacattcaacctaatataggtggcttccactctttatcacctactaggccaggcccttgctcagcatcttacaagacctaaacttcacgaagcaggtactactgttaccatctccgttttgcagatagggaaactgaggctcatgggacttattgagactcatgtagagtctctatcctctattcatccatgattcatccatcaatccatcctctatcatccatctatcctctactcatccttccatcacccatccatccatcacccatccgtccatccatctacccacccatccatccatgaacccatcctctatacatttatacattcatccatccattcaccctccatctgccatccatccatctccctccctccccatgtgtatctggacccggaactaggatttggaaattcagagataatgagatttataagaagcaaagctgggatttgaactcaggactctctaactgcagagcgcgtgctttgcaccagcacaccaggatgctgccagccgtcaccacccttgctgtgttgtgtctcctcactggtttacttctttgctgtctgctaattctgccccaaggttcatctcttatggcctgggagtggtggcattcttttgtcatttctggaattacatttaactataccagaaagtgcaaaccaatggttcctgagcccacaggagagatcggccactacaaccttcaaaatttttagaaattggttcctaaagtttaaatatgggtaggccgggcactgtggcctataatcccaaccctatgggaggccaaggcacatggatcacttgaagtcaggagtttgagaccagcctggccaacatggtgaaactccgtctctactaaaaatagaaaaattagccgggtgtggtggcacacgcctgtaatcccagctactctggaggctgaggcaggagaattcccctgaacctgggaagcgcagaggttgcagtgagccgagattgcaccaatgcactccaacctgggtgacagcaagactcagtctcacacacacacacacacacacacacacacacacacacacacacaccaaaaaacatgggtacacttcacataaaaactctgggtttccattatctagaaaaatcagaagttccagcaacacttggcttatatcccctgtggcaatgacggagtagctgctggccccttcagatgggtttgtggcctccttgggtccccacagtcctcattagttggctttgttcatttagaccagtggttctctgccagaggtgagtttgcctcccaggggacattgagtagtatctggtgacatttgtggttgtcacaactctgtcagggtaaccaccactgacatctagtggttagaggccagggatgctactaaacttcccatgatacccaggacagctccccacaatagagaattatctggcccccaatttctgcagtgacaagattgagaaaccctgagttggccggctcgcctgggctgtgcaggcatttcaggaatctttagtttaaattgacacttttaaaactgtgagtgcaactcttcatagtttacaaagactctttcatagatgttatggttaaaaggaagtgtgtttccaagccctgtcaacagcagcttcattcattttggggagaaggctttctaccatagtaagtgggagcaaatggatgggtggtcagcagctgggtccttttgctgagctgggccagggaccccatggcgtgagaatagctgttgtgaagggccttgtaatgtctggtttggcctgaggaaccagagaagtctgggatctctaggctttgttcctggaacatagtgactgatttgaagccagaactctgggtgatttgtacctgagttaagctaagccaagaatttgcattaatcatcatccatccattcatccatctaccatccatccatcatctgtccatccatccattcatccatccatcatccatccatcaatgctgtatccattcctccatcaattctccatccatctatccatcgtctatccatcaatcctctgtccattccatctatccatctatcctctatccatccatccatcatccgtctatcctctatccatgaattattcatccatcaatccatcctctattcatccatctatcctctactcatccgtccatcattcacccattcatctacccacccatccatccatccgtccattcatccatgaacccatcctctatccatttattcattcatccatccatccaccttccacctaccatccatccatctctctccctccctcccatgtgtatcaggaccttggaataggctttggaaattcaaagatgattagggcaggccctccactctccagaaactcatggtcttatggggatttcagacatagaaactattttaacagtaacatggcctgagtatggagtcagaaaggttccaagtattctgggaacacagcgtttttgtttggagacacctggacaacaagtggaaacaaatgtatatcttcttcatcccaacatgggcatctgttacacccagaagagtatgtaagaagcacagggtttttatttcaaaaatccttttattgacatatgatttacatggagaaaattgtgtatgccatagcgtgcagtgcaaagaattattataaactgaacacgtctgtgtaactagaatccattttaaataagacaatgccaccagccccatggaagctcccacatgcaccttctaagaacttccctcaattaaggataatcattatcctgacttctaacagcatcgattagttttgcctcttcttgaatggacggtctatatatggacttagacagtatgttcttgtttccatctgtcctcttttgttcggtatttgtgtctggaagatatgtcagggttttttttttgttttagagacaggatctccctacattgcccaggctgtatcaagctcctggcttcaagcagttctcccacctcagcctcccaaagtgctggggtcgcaggcatgagtcactatgctggccccaatacatcagttttgatttgtggtagttgtagctcattcattctcactgttctgtggcaggggttgctaacacatttttctgtaaagggtcagatagtaaattctttagcctttgtaggccagacgatctttgttgcaactcattaactctgccagtgtagcatgcaaatagttacagacaatatgtaaatgaatgagtatagctgttttccactaaaactttatgtataatagcaagcagtgggccagatttggtccatgggctgtaatttgccagtccctgctgcgtggcattccattgtaatgcaaggttttaagcaaccatatgaaaatattgagctcagaatctagtttcttcagaggaaagatgtaagctggctctgggtccccagtggctttaggctccaaaactccagggtaccttggcattgacctttgtgtctgctctgcccttctctccccacctcagccatattgaaggtggtatcatcggtcctgcagcttggaaatatcgtcttcaagaaggaaagaaacacagaccaggcgtccatgccagataacacaggtacttgccactttttcctgatgaccaatgactttggggttgggggggtgggggaggtgacatttaaccactggttatttttcaaggtgaaggtatctgggattttaacaacagttggactaggttcttatcactcactttttcaaacttttcagtgctcaagaccctatgtggaaagttattgaatcagagcgcagggattaaaaaaaaacaaacctaatagttttatttatttgttcttttttttaaatacaaaattttacaagttttaatagagacgaggtctcgctgtgttgcccaagctgatcttgaactcctgagctcaagtgatcctcccaccttggcctcccaaaatgctgggattacaggcaagagtcatcacgtcctacccctaatagtgaccagacaagatcccgagggaccatctcttctaaaataccccacttaattgttttgttaaagaaatatttctcaagcccctgcaatatgccactgggatacagcaggaaatgacacaagaatagctcttcttacggtatctgtggtcgtcttggggagacagacctcaattgccctgagaattaggggtgccagataaaatacaggatgtccagataaatttcaattttaggtaaacaacaaacctttttttaaattttaattatgtcccttgtaacatttggaccgtgattataccaaaagagtattcttgtttatctgaaattcaggtttaactgagcatcctgtaattttccccctaaatctgataaacctacccacaaataaacagtattttgtgttttgagaagctggcctggctaccactatgcttgttggtggctgagctgagagcaaaacttaggtttcttatttcccagcccaggctgtatattgtgttgctttttcccgctccctagagcccaccttgatcaaacctgttgcaaccgcttactgggtttaccttgcccacagcctagacagagccaattaatcaagacaggggaattgcgatagagtaagagtaactcacgcagagccggctgcatgggagaacagagttttattattactcaaatcaatctccttgagcattcgtggatcagagtttttaagcataatgtggttagggggaggccagtgagttgggggtgctgattggttgggtcagagatgaaattacagggagtcgaagctgtcctcttgccctgagtcagttcctggacagaggccataagatcagatgagccagtttctcgatctgggtggtgtcagctgatccacctggtgccagggtccgcaaaaatatctcaagtactggtcttaggttttacaatagtgatgttatccccaggagcaatttagggagggtcagactcttgtagcctccagttacaggactcctaaaccataatttcaaacctttgggctaatttgttattcctacaaaggcagtctagtctccaggcaagaagggggtttgttttgggaaagggttcttgtgttttaaactataaactaagaggctaggcgtggtggctcatgcctgtaatcctaggattttgggaggcccaggcaggtggatcacttgaagtcaggagttcaagaccagcctcgccaacatggtgaaaccccatctctactaaaaatacaaaaattagccaggcgtagtggcaggcgcctgtaatcccagctactcaggaggctgaggcaggagaactgcttgaacgcaggaggcggagattgcagtgcgccgagattgtgccactgcactccagcctgggtaacagagtgagactctgtgtccaaaacataaaaaataaactataaactaagttcctgccaagttaattcggcttacacccacaaatggttcagtggagcttggaggttagaagcaaggtggagtccgttaggtcagatcttgttcagtgtctcagttataattttgcagtggcagtttcattctcaggtgtttgttatgtattagagtccctaaatctggcaaattaatggaatccggatgccaaggaaagacctcagggaaagagaaatgaaaaagtgctcttgccaagagatggggaaaaaaaaatcctaaaatcactctatttactctgccttgcacatgcaaagcagcatgtaatgctattttcatgttaagggaccagctcgtggtcacaccactgcacttcagcccgggcgacaggaagactgcatctcaaaataaaagaagagcatttaggttgactctagcattttgctattgcaaacaatgctgcaacacatatcctagaagggtgaaagaaatatttattgaacagtaactgttcaataaatgttactattaataactatttaatacttactaagtaactgttaaataaatctcaagggccagtggctcacgcctgtaatcccagcacttagggaggccgaggtgggcggattgcctgagttcaggacttcgagaccagcctgggcaacacggtgtaactccatctcaactaaaatacaaaagaaattagctgggtgtggtggcaggcacctataatgccagctactcgggaggctgaggcaggagaattgcttgaacccggaaggcggaggttgcagtgagctgagatcgcgccactgcactccagcctgggcgacagagcgagactctgtctccaaaaataaataaataaataaacaaataaataaataaataaatctatctatctcagggactttacatactttaccttatttagtcctgggtaccaacaaggtaccgaagagctgaccctttttaaagctgagaaaagcaagatgctgggagggtaaagagcttttccaaagtcacatgacttggaagtgtgaagggacagggacttgaaactagaactacctgaccctaaacccccaactggggcctgcttcagcccaccccaatcattgcctctcagcaaaatactggggagtgtgaccactaatgacagcagcctttaggacacttcaagctatattcatggtcagcgggtcccatttccccaagagaacccgctgtattcacagatcacaaatatcccatgcgatgtgtcttcttgccaagctatttcttttgtgatgcactcacgatgtttcttttctccatccagctgctcagaaagtttgccacctcatgggaattaatgtgacagatttcaccagatccatcctcactcctcgtatcaaggttgggcgagatgtggtacagaaagctcagacaaaagaacaggtaatgatgtacttatcacttatccatccatgcacccacccatccatccattcatccatctatccacctgttcactcattcatgtattcattaatccattcacccatggtctgcctctgcatctgtccatccatccatctttctacccactcattcatctgtctgttcatccatccatccatccatccattcatctgcccatctatctgctcacccatcatctctccatccctcactcatccatctgtccatccatccatgacccagccatctgtccatctgtccgtccatccatcacccatccagctgtcattccattcattcattcattcattcatctgtccatgcatccacccatccatctctttatccctcatttattcaatactagaatattcacagtcccatgtcaggttttgtttgtttgtttgttttttgtttttgagccagagccttgctctgttgcccaggggggggtgcagtggtgccatcgcagctcactgtagcctctgcctcccagattcaaacgattctcctgcctcagtcccccaagcagctgggactacaggcatgcaccacaacgcctggctaatttttgtatttttagtagagaagggtttttgccttgttggtcaggctggtcttgaactcccgacctcaagtgacccacctgcctcggcctcccaaagtgctgggattacagtgtgagtcactgcacccggccaagaataaaaatcttcaccaccagcctggcttatgtgaaaatggagcccattgagaataaccgggttcccctggttgccctctgcaggctgactttgctgtagaggctttggccaaggcaacatatgagcgccttttccgctggatactcacccgcgtgaacaaagccctggacaagacccatcggcaaggggcttccttcctggggatcctggatatagctggatttgagatctttgaggtacagctcggtgggatcctaagagccatggtcttggttgtctgagatgggctttttcttggaggagtcatgattttggagaaaggcatgtagatggctactgtagggtaggaggctgtctagttaagggtggatcattgagggtataagagacagaaatccaacaggaaatgcattggtttctggaactgagaaggccagacatgtagctggatcccgtaggcagggtctgatctcccgccatcgttctctctctctctctgccttcctccatattggctccattctcaagcaggctctcccctcacgggggcaagatggctgccacagctccagactgcctctcagtaatcctggtaaaaaaaaaaaaaaaaaaaaagcacatatctcttttctaacagttccaaccaaaatcttggaattaagtctcactgactcttactcacctgaattgggctacatggtcacctccaagccaagaactgtttgcaggagcttgcaatacctcatgtagtagaaacatggatattggatcctttacccatgggtttgaagaaagttctcagagaaagggaaggttttttttttgtcttgtcttgtttttttttttttgagacagagtcttgctctgtcgcccagactggaatgcagtgtcacaattttgtctcactgctgcctccgcctcctgggttcaagcaattctcttgtctcagcctcctgagtagctgggactacaggagtgtaccactgtgcccagctaattttttttttttttttagacagagtctcgctctgttgcccaggccggagtgcagtagtgcaatcttggctcaccgcaacctccgcctcccaggttcaagtgattctcctgcctcagcctctcgagtagctgggattagtgccaccatgcctggctacttttttttttttttttggtagagacagagtttcaccctgttggccaggctagtctcaaactcctgatctcaaatgatccaccagcctcggcctcccaaagtgctgggattacaggtatgagccactgtgcttggccaatttttgtatttttagtggagagaggtttcgctatgcttgccaggctggtcgcaaactcctgacctcaagtgatcctcccgccttggcctccctaagtgctgggattacaatcatgagcactacacccagccaggaggttttaagattgatagatgtcccgaaagaagtgtactaccgagtcactttctctctgcgcctctgttttcacatctgtaaaatgtttccacatctgtacatgcagtagcgtgccttacgaggtttgtccatccatagatggttgtgcagatggaggagataagcatctttaaggtgtgtgagggccatgtgatatcaacttcaccagccctggtggactctaggcagcatgttttggggcctcagccctgtctgggtgctgggatggcagaacaggatgtgggcgggccatgggggcgctgtcgggtggagcttctgtggggctccttgtcttctgacttcataccaagatgctcacgccccgcccccacgccatgtgctcaggtgaactccttcgagcagctgtgcatcaactacaccaacgagaagctgcagcagctcttcaaccacaccatgttcatcctggagcaggaggagtaccagcgcgagggcatcgagtggaacttcatcgactttgggctggacctacagccctgcatcgagctcatcgagcgaccggtgaggggcacgtgggcgtgcggggctccgtcacaccttgtacacgtgtgtggcctctgtggagccgacgtggaccccacactctccccatgcacatagcattcccccacccaatccatcacccagtcctgaaaggctgtaagctgaatccttgtgaactcttacaatttccattaacccacattttcatatcaaaggtattttctttaatttctgccttccttccatcctcttttttcttcctttttttcttccctaccctctttcccttccctttccttctctgccattgctttttttttttttttttttttttttatgacatggtctgactctgttgcccaggctggagtgcagtggcacaatcttgcctcactgcaacctccacctccctgcctcaagtgatcctcccgcctcagcctcccaagtggctgagactacaggcgtgcaccaccacgcccacctaacttttgtattttcagtagagacagggtttctactaattagccgggcctggtggtgcacgcctgtggtcccagctatttgggaggctgaggtgggaggattgcttgagccctggaggcagaggttgctgtaagccgagattgcgccactgcattccagcctggataacagagtgagaccctgtctccaaaaaaaacttttctaacaggaaccctaggtgaattcaagtcaagcaacaaattcatttgcaagaattatgaactcggccgggcgcggtggctcatgcctgtaatcccagcactttgggaggccgaggcgggcggatcacgaggtcaggagatggagaccatcctggctaacacggtgaaaccccgcctctactaaaaatagaaaaaatcagccgggcgccgtggcaggcgcctgtagtcccagctactcgggaggctgaggcaggagaatggcgtgaacccaggaagcggagcttgcagtgagtcgagatcgcgccactgcaccgtctgcctgggcgacaaggcaaaactctgtctcaaaaaaaaaaaaaaaaaaaaaagagttatgaactcttcatgatgttgcctgcgtgttgcccactagggggcggcagcaaacattatgttctgccttccatccctgttactggtccattgggcacagggtaatttgaaggtagatttggaagcatgggggtcataaactcatctttatatgtgggcaaatacagtatcagatctcggcggatgcccatgcgttgtgtatagttggccagctcttcatggaatgcctgaggttgggtgttctctctgattcaagccctacttgtctcccacagaacaaccctccaggtgtgctggccctgctggacgaggaatgctggttccccaaagccacggacaagtctttcgtggagaagctgtgcacggagcagggcagccaccccaagttccagaagcccaagcagctcaaggacaagactgagttctccatcatccattatgctgggaaggtaccagccacagggcccaggggactctgtctcaggggacccccagtggctgctcagcgcagagacagtctgagagtggcagaaccttgggctgcctggaaactgcaaagccatctgctgctaagcgaatcccaaccaagtcctattcgtaatttgtctacgcatctgtaaggcatcagctgtagccactctcatgttttccaaccgtgacgtccagacagttatttctttctgtttttgttggagacagggtctcgctttgtcgcccaggctggagtgcagtggtgcgatcatagctcactacagcctcaacctcctgggctcacacgatcctcctgcctcagcttcccaagtagctgggactacaggtgtacaccaccatgcccagctaaaatcttttttcctttttgagatggaattttgctcttgtcatccaggctggagtgcaatggcgtgatctctgctaactgcaacctctccctccgggttcaagagattctcctgcctcagcctcccaaatagctgggattacaggcacctgccaccacacccagctaatttttgtatttttagtagagaagggtttcgccatgttggccaggctggtctcaaactcctgacctcaggtgatccacccgcctcggcctcccaaggtgctaggattacaggcatgagccaccgtgcctggccgcccagctaaatttttaaattatgtatagatatggggtcttgctgtgttgcccaggctggtcttgaattcctgggctcaagagatctccctgcctcggcttcctgaagtgctgggattatgagcacgagccactgtacctggcctcagcctgcttttcttgtatagactctaaatccttcctgctacaagttatacccaacaggcggggccaactggaatggggtgactaatacatccacacctggcttcaacaaaaatctcccatgtcacggtcttgagtttgctattgccagcctgctctggccagggaaatctatgatagttgtattcatcatcatcatcatcatcatcaacatgccttggctgttattgtataggcccttgccctgtggctctcaagagtcctggataatgtacaaaggacatagcttagtctggcttgcagaattgtagtattctattgactcctcagtacctccactgcatcatgggcacaaacaatgctctctaccagggcctggcaacagagtccgatctggcccacagcttgttattgtaaataaagttttattggaacacagccatgcccatttgtatgcataatgtctatggctggctgcttttgtatactacagtgctagagttgagtagctgcgacaaagactgtatgacttggctgggtgtggtggctcacgcctgtaaccccagcaccaaggcaggtggattacttgaggtcagcagtttgagaccagcctggccaacatggcgaaagcccgtctctgctaaaaataaaaaataaaaaaaatttaaaaattagccagctgtgagattacaggcacacaactgtaacctcagctactcaggaggctgaggcaagagaactgcttgacccaggaagttggaggttgcagtgagctgagactgcaccactgcactccagactgggcaacagagaaccactctgtctcaaaaaccaaaacaaacaaacaaacaaaacattgtatgacttgccaagccaaaaatatctactatctgggccttcaccaaaagtttcccaactcctagcctatattcaagggggtatatgttcctttaagcatatagagacaacacttttcttttccctacttcatcagtggattttttttattattattttcagtcttctctcagatcaagcctacctattatcctgataacccacatcccatgataacccagcaaagctgtattatcagttcctttcatttaatattcaccatagtaaaaattacggctttgggcattgtcattgtttgagtcaggaatgtaaaaagcctatatgtcctttttctgtatatccatatatcaggatctctgagttacaaattatgctcattagagagtggaaaataggatgccatgcttaattaatttatttatttaattattttgagacagagtctcactctgtcacccaggctggagttcagtggcgcaatctcagctcactgcaatctccgcctcccaggctgaagcgattctcctgcctcagcctcccgagtagctggcattacaggtgtgcaccaccatgcctggctaattttttttttttttttgtatttttagtagacatggggtttcaccatgttggtcaggttggtcttgaacgcctgacctcaaatgatccacccaccttggccttccacagtgctgggattaccagtgtgaaccaccacgcttggctgccatgcttaatttctaaaccaggatgattgggaagatgatgaggggggagttttgcatgtcggcaggagggcatctgccgtcatgaaatctcttaatagtgtataactcacaggtactgtgctggcttaggaggagggaggctaccacagcagcgttagtaggagaatatggaatggaaactaggctttcccagcaatggctatcactggctgatgtcctactacgtgggcacaggtccctgggctgttggtctcttcactggtgtttgtggagtcccatcatggtggtcataaacgtcatttcctctctgacctcagaagatctggaaggacaatgggagggctggggtcctggccttggtttctaagtttctagtttcccaggggttctgaccagcagggtgtccttggcaggtggactataatgcgagtgcctggctgaccaagaatatggacccgctgaatgacaacgtgacttccctgctcaatgcctcctccgacaagtttgtggccgacctgtggaaggacggtaaggccttctctgctcgggtccatgttctgctttgagctggagaattgaacacccaagtcccccgactctcacacctgccccaggaggggaggcctttacatgggggcaggggaaggaagagcattggcatgggctggtgatgtctcgttgaaacaatttcttcctgagtgggggtccctgagcccctcaatcctacatgtcccgaggggattgaggtcctgaggtcagggctcaggcaatagaggagaaacagcatgccaggcacggggagttagactgccctgtccagagtcagaaggacttcactgtatcttgtctctgccacctcctagctctgtggtcttggatgagtcacttgatgtcattaagcttcattgtcctcattagtaaaacaggagatgcaataatagttgccgtctctactagaggtattatgagggttaaattagaccagtgatgctcaaactcaagcaggcatcatgaccccctggaaggctttgtttatttatttagggacagagtcttgctttgtcacccaggctggagggcggtggtgcaatcttggctcactgcagcctccaccttctgggttccagtgattttcctgcctcagcctcccaagtagctagcattacaggcacacaccaccatacctggctaatttttgtatttttagtagagacggggttcccccatgttggccaggctggtctcaaactcctgacctcaggtgatccgcccacctcagcctcaaaaagtgctgggattacaggtgtgagccactgcacctggccctctttggagggctttttaaaacccagatggctgggcctaccctaagatctaattctgcaggtctggggccagggatggggcgggcctgaaaacattcatcccaggtgatgctgctggtctagggaccacactccggctccctttgagaaccagtgaatagatgatccctgtgaagagctgctggagtgatgatgaggggagggggtttgctgtttgtccctggccatcagtgtccacagcaggttttattcttggcacagggcccatgggcctggggcttacaggactggtctccccttgttttaagcatgctaaaaaaagggctccaggaggggccagctgtgccctaaccatatgccaggctctgggcctagggaacaacatcgcaccctgggtctgtgtcatcccaggacacatgatgaagcctgtagtccctcctctgcgggacccacagtcttgtgggagagatgagactctcaaagacaagcagagagacaagcatgaggctgcgcatggtggctcacacctgtaatctcagcactttgggaggctgaggcaggaggatcagttgaggtcaagagttcgagaccagtctggccaacgtggcgaaaccccatctctactaaaaatacaaaaactaactgggcgtggtggtggtaatcccagctactcgggaggctgaggcaggagaactgcttgaacctgggaggcgcaggttgcagtgagctgagattgtgccattggactccagcctgggcaaaagagcaagactctgtcttgaaaaaataaaactaaaaataaaaaataaaaacaaaattagccgggtgtgctggtgggtgcctgtaatcccagctactcaggaggctaaggcaggagaatcacctgaacctgggtggtgaaggttgcagtgagccaagatcgtgccactgctctccagctgggcgacagagtgagagcttgtctcaaaaaaaaaaaaaaaaaaaaaagattgttacacagaatctgagtagaaggtgaagaaatggtgccatccatggcctgtgggttgggcttggcatgtgcaggacctgctgggctggtagaaaaagaaccttggaggtgatgatgatgatgatgatgatgatgatgatgatggccgggcgcggtagctcacgcctgtaatcccagcacattgggaggccaaggcaggggaatcacctgaggtcaggagttcgagaccagcctgaccaacatggagaaactctgtctctactaaaaatataaaaaaaatgagccgggcgtggtggcgcatgcctgtaatcccagctactgggaggctgaggcgggagaattgctggaacccgggaggcggacgttgtggtgagccgagatcacgccattgcactccagcctggccaacaagagtgaaactccgtctcaataaaataaaataatgataataataataataataataataataataataataataatacctactttttgttgagcacttactgatgtgccaggctatctcggagtgtgtgctgtatcttctgcctcagaatatttcttccgtggatacctacatggttacccactcatttcttgctggtttctgctcaaatatcaacttagcagagcccaccacctccttgtctaagagagcaccctcttcactctctctccgctttaccctatttttatttttctacgcacacctcactactcaagatattccatacttaacatctgtgatctctgtctgtctccttccctgtgatataagcggggtgagggggccgggtctttttttgttcacagcagtgtccccagggcctggagcacagaaggtcctcaataactatttgttggtggatgaaagattggaggctggcagggaataagtgccttctgtgccttatttttttttacccctgccctagaaggtagacggtattattacctcccttttgtagaaagggagactgaggcacaggatagtgccaagccaaggctagtcagtgagtggacagcgagagcaggcttgactcctaggtcagcgtgactccatcacagggaatttgttctttctgccactcaggtgctctcaggatttccccaatagacaatacttggaaaccctgactgccgaaggaggcgttggtgatggaaggaaagattggagtgggcaggttggtgggtggggctggggctgagcctctggcctatttaggggtgggtgggccagaggctgatgccaccctggctgtgccccatagtggaccgcatcgtgggcctggaccagatggccaagatgacggagagctcgctgcccagcgcctccaagaccaagaagggcatgttccgcacagtggggcagctgtacaaggagcagctgggcaagctgatgaccacgctacgcaacaccacgcccaacttcgtgcgctgcatcatccccaaccacgagaagagggtgaggcccgccgcccagaccctggggctcccagaagccagggctgtcccaagcggtcacagcgtccccagggcgccctctgcccccacctaccccgaggaccccattttccatgtggggaaggctatctgaatctcagacccattccccatccctggaggaaaaggaggaagggaggatgcatccagagacttttcagttgtggagttgctgtgcaggtcatccagccactcattcattcattatcccaggaagtattcactgggctctgccctgtcctgggtgctggggagcagtgttagaaaaattgtagcccttccctgtgggtttctcataatctggtgcaggcatcttcagcttggggcgattgtgtcctctatatggacatgctacagacatttttggttgtcacaaccaggagggggctgttagtcagcatctagtgggtaggggccagggatgccctaagcattgtacaatgcacaggatggtccctcaacccccagcacagaatccctacaagatgccagtagtgctgaggttatgggagacacggggagaggtaaacatacagctgatgatggtgatggaatgtggtcagttaggagaacaccaaagagccagggctcctcccacagcctcaggactcagagaaagcttctggtgaacttgaacgttaagaatgtgtggccatcaacttggtgacatggaaggcagggtggggcctaggataagcagggggcctaggataagcagagggcccaggctaagcaagagtgtggaggtgagaagtgaaggaactaggtaagaaaatgctagatagtgtccaggcgtgttgctcacgcctgtaatcccagctactcaggaggctgagaaacaaaaatctgttgaacccaggaggcggaggttgcagtgagctgagattgcaccacagcattccagcctgggcagcagagcgagactccatcttaaaaaaaaaaaaaaaaaaggaaagaaaatgctaaataggtcatttcatgttgcaaatgtgtgatggcatgaggtaggaatcagatggtgtgaggtaggattgaggctgaatgggtaggcaggggctagatcgtggtgctccttgtgttctttctggagcttggccttctctctctaggcatgccattgggggtgttaaagcagggctatatcatggtcagatttacattttaggaagtgaatgagggggctgggcatatgctagctcatgcctataatcccaacactttgggaggttgaggtgggaggatcacttgagaccaggtgttcaaggctagcctgggcaacatagcaagaccctatatctacaaaaacatttttaaaaattttccaggcatggtagcacatacctgtggtcccaaatacttgggaggctgatttgggaggatcacttgagcccaggagtttgaggctgcagtgagccatgatcgcaccactggactccagcctggctgacagaatgggaccctatctcaaaaaataaaaaggacaaagggattgaggggagaggcaagaccagagagagagaccaggtgggtggtttctgtggttgtccaggcaggagaagatagtggagacaatggtggtgaagagaagtgggggggttgggagatatttgggagctagaagcaatcaaactgctgatggacaggaagtgagggagacgaggtgatgaggaggaagccccaggttccagccaggcgatgctagtgtcaccaagaaccagagagatcatgaggcagccattgccgaagcaaagagatgaaaacccagaggggggcactgctttgcccctcggccctcagctaagccctccttgggtgcttctgttggtaccctcatggcctggccaggtgggtcatccaggtaggaggtttggggctttgctgcgccatggtttctggccccagggatccactgccctctttgacctttgcagtccggcaagctggatgcgttcctggtgctggagcagctgcggtgcaatggggtgctggaaggcattcgcatctgccggcagggcttccccaaccggatcgtcttccaggagttccgccaacggtaagtcccaaggtctggcccaggtagggcagggggtgagcgggactgggtggaggaatggatgctggaggtacccggggtgacttctgctctgtgtttcaagctacgagatcctggcggcgaatgccatccccaaaggcttcatggacgggaagcaggcctgcattctcatggtgagcccagaagtccaccagagacctcccaacctctggccgcaagccacctgctgctcttggtgggaccgttcttacccatgtcatcactggccaaatggcacagtggaaatcaggagctcttcctttccttccttttgcagatcaaagccctggaacttgaccccaacttatacaggatagggcagagcaaaatcttcttccgaactggcgtcctggcccacctagaggaggagcgagatttgaagatcaccgatgtcatcatggccttccaggcgatgtgtcgtggctacttggccagaaagtaaagatgctttcctgcatcctaatacctcaaacgcgaatcacaaacaggggcctttctgttctgattccctgattctaagaggccacctgtttaagatgcatcattgactgaatgacagccttttcttgaaggggaagaaatgcttctactttaaataaatgtaccaagttacgagtgcaggaagggaacgagttttagacctgggttctcatcgtggatgccccagtttttgctgatgaaccttgggcaagttactctacctctctgagcttccagttttttagctggaaactgagcataatcattttgacctcagagagctgttcatgaggtgtcactaagataacgcatgacgagagcttagaacagtgcgtggttctcaggtcagaaatgattgttgttgtttttacctccctccctcactccttccttccctccctcccttccttccttcctttcttcttcctttttgagacagagtctctctctctctctctgtcgcccaggctggagtgcagtggcgcagtctcaactcactgcaacctctgcctcttggactcaagcaattctcgtgtctgagcctcccgagtggctggaattagaggcgcccaccaccacactggcctaatttttgtatttttagtagagacaaagtttcaccatgttggccaggctggtctcaaattcctggtctcaagtgatccacctgccttggcctcccaaagtgctgggattataggcatgacccactgcgcccagcctagacatgttagaattggataaaccattgaggaaagaggacttgacggtgtctagatccccgtgtcccagtgggatttataaggcagggttttggagggtgtgatgtcccagctgttctgtgaagactgggagccggggaagggttcgggttccttaatgaaagtcataccccagggactgcagggacaggtggggtcgctctctgtctggggtgtgtgttgtcattgggcagagaccacaccctcaccagtaggaccctgatgtgtcaggttcattcattgacacatggacccaagatggtcaaggccagctttgggagctcttggccctcccgcaacagacctaacttgtcaagtttcgttactaagttccctgttgctgtccttcctggataactggggcaattttattcttaaagttttcctgtgtccaagatggcagccaagcagggaagacagaattacgttcactgttctatcgtttctcaatctatcgatagcccttaaacgggaagagtgctggttcagggtcacagtgtgaaattcctaaaacaacccaggagagaataggtttgacagggctgggtgtggtagctgacacctgtaatcccaggcactttgggaggccgaggcaggaggattgcttgagcccaggagtttgagaccagcctgggcaacatggcgagacccctatctctaccaaaaaaaaaaaactttaaaaattagctgggcatggtagcatgtgcccgtagtcccaactacttgggaggctgaggcaggaggatcatttaagcccaggaatttgaggctgcagtgagccatcatcacaccactgcactccagcctgggccgcagagccagaccctgtctctgaaaataaacaaataaataaataagttagtcagaaacagctggtgtaggctgggcatggtggctcctacctgtaatcccagcactttgggaggccaaggtgggtggatcacctgaggtcaggagtttgagacccacctggccaacatgggaaaccccatctctactaaaaatacaaaaattagccaggcatggttgtgggcacctgtaatccaagctactcaggaggctgaagcaggagaatcacttgaaccccggaggtggagtttgcagtgagctgagatcgtgccaccgcactccagcctgggcaacaagagcgaaactctatctcaaaaaaaaaaaaaaaaaaaaaagaaagaaagaaaaaagaaacagctagtgcagctggggagtacgggagcccccttaggaatgatgcacatagttgtgttttctgagtggtgtttggatctcagctaagtccagggcatgttgtgagccctgggtcttccttgtccactgaaaaaggctctgtcctgtagatgatttaagttgtttgcagccagacaacacatgtgtcacacagggtttctggaagaacctgagttggggagattggggcatgtccctgtgcaggttcaggatgctgcagggcagggctctgttgacagcagggtgtggcttcatgacccccgcaccttctcttcccccctccctagggcttttgccaagaggcagcagcagctgaccgccatgaaggtgattcagaggaactgcgccgcctacctcaagctgcggaactggcagtggtggaggcttttcaccaaagtgagtgctctgccccagcccccttcccaggggcccccagccctgcttcttcactctggagccttcacatttgggacaggaggtggtcgcaagtgggtgtggaatggagggctcgaactcagaccttgagcattggcggttctctggcccgaggaggccctgtcctttggcacataggctatagccaggaccttaacacaaagtattaatatttccatccgcactggaatccctcgtgtggcccatttatagccacacccacttcctccgtagccatggaaaccactctgttctccagttctgtaattttgatggttcaagaatgctgccgggggcggcggctcacgcctgtaatcccagcactttgggaggccgaggcaggcggatcacttgcggtcaggagttcaaaaccagcctggccaacatggcaaaaccctgtctctacttaaaatacaaaaattagctgggtatggtggcaggcacctgtaatcccagatactcaggaggctaaggcaggagaatctcttgaactcaggagacagaggttgcagtgagccaagatcatgcctgcactccagcctgggtgaaagattgagactctgtctcttctttctttttttttttatttaaaaaaaaggccaggcacggtggctcacggctgtaatcccagcactttgggaggccgaggcgggtggatcacaaagtcaagaaatcaagaccatcctggccaagatggtgaaaccctgtctctactaaatgtacaaaaattagctgggcgtggtggcaaacgcctgtagtcacagctactcaggaggctgaggcaagagaatcacttgaacctgggaggcagaggttgcagagagctgagatcgcgccactgtactgcactccagcctggtgacagagcgagactccgtctcaaaaaaaaataaaacaaatattctatacatggaattagagagcatccagactgttgcatgtatcaatactgcaggtttttttttttttactttttgcattttttgaaatggagtctcactctgttacccaggctggtcttgaactcctgacctcaagcaaccctcctgcttcaggctcccaaagtgctgggattacaggcatgagccacctcatctggccatagcatattattttttatttctggcagagtcagggcctccagaggactcaactggttcctgtagtggcactggttgcattgtccccatggcacaaagacatgctctgttgcaatagactaggcttctccttatatgcccttgagtgtatccactggtgcaaggctttttcaccaagcaaacagacattgagtgcctgctgtatcccaggcacatgctaggtgctgggggtgcagctgtgaacacacaccatggtccctgacctccatgaatattctagccgaattggtggggagtaaacaataaacagataatcacagagacagatacataatggcaaactgtgataagtgcatgaagcaagctgctggagtacatagcaggggcttccttgtgccaggcaggggcttgaaaacaaagagttaggaggcagcccagggaaggacagcagatgctgctttttggaaatgttcgtccccactgaaccaacttctgaaaaactatcctaagaaaatcgtcttagccaggtgtggtggctcatgcctgtaatcccagcactttgggtggccaaggcaggaggatcacctgggttcacgagttcgaaaccagcctggccaacatggcgaaaccctatctctactgaaaatacaaaaattagccaggtgtggtggtgggcacctgtaatcccagctactcaggagattgaggcaggagaatcacttgaaccgaggaggcagaggtttcagtgagctgagatcgtgccactgcactccagcctgggtgacagggcgagactccacctgaaaaagagaaaagaaaatcaagagttaagggcattcattatggccttatttacaatagcagaatttcagtgtccagtcctagctgaatgatgagttcaataatggttcatctatcaatggaatgttttcagctattaaaatgatggctttggctactgaataggtctgctaaaaaaaaaaaaaaaaaagacttctacctagctgtctagttggacactgtggcatgtgcctgtagtcccagctactctggagctggggtgggaggatcgcttgaggccaggagttcaaggctgcagtgagctatgattgtgtcactgcactccagcctgggtgacaaaacaagaccatcgctaaataaataaattaacttaaaagatggctatgtaaagttgtaagaatgatgtaacagcatggggtaatacatatcttataatttttaaaaaaattttatttgtggagacagggtctcactgtgtcacccaggctggagtgcagtggcacaatcgtggctcactgcagcctcagcctgcagggttcaagcgatcttcctgcctcagacccctcactagctgggactacaggcacacaccaccatgcctggttacttgtttttgtagagatggggtctcatgatgttgcccaggctggtcccaaactcctgggctcaagcgcttgcctcggcctcccaaaatgctgggattacaggcatgcatcactgttcctgtctgtatcatataattttaaataataaaagcagcctctacaactaggcagcatggtcttaagtctattttttaaacatagaaaaagagccaggaaggaaatgtaaacaatgttaataatgactttgatagggaggtgggtgggatatgaaagattttttttctcccttttgtccttggaaggaaatatcacttttcagcagtagttctctgttgggatggttctaaagtggggaagatgagactttttcctttcactttgtaccttttctggtgctctgatttagagctcctcagtcttgccactgttgatattttggggtgactaattctgttgtgggggctgtcctgtgcactgtagggtgtttagcagtatccctggcctctacccactggatgccagaggcaccccccaccccagctgtgacaatcagcagtgtctccagacaatatcccctagtggggatcggtgggggcaacattgtccctggctcggaaccactgatcgaatttattatgacaacatatccctttgccacaaaaacaaatgatgggctaaccgtgtgtgtgcaggtgaagccactgctgcaggtgacacggcaggaggaggagatgcaggccaaggaggatgaactgcagaagaccaaggagcggcagcagaaggcagagaatgagcttaaggagctggaacagaagcactcgcaggtacctgtatggatgcatggctggggttgctggggaacaggacttggccccgtggggctcacccgcctcctccccaccacctgcgtgcagctgaccgaggagaagaacctgctacaggaacagctgcaggcagagacagagctgtatgcagaggctgaggagatgcgggtgcggctggcggccaagaagcaggagctggaggagatactgcatgagatggaggcccgcctggaggaggaggaagacaggggccagcagctacaggctgaaaggaagaagatggcccagcagatgctggtaaggtgtcacaggggcagcccgtggtgggtagcaaatcacttgaccctcaccacaggcctgtggaggtgcatccagggatatgtgtccctgctgggacagatgatgagacgggggcttggagagggttggtcatctgatcaaggccacacagctgggattgggactggaacacagtgagcccactctgttctattgccctgccttgcatgtgctaaccccttttctcctaacagcaagcctgaatggaggataattgtatttgttagctattgctacataacaaaacatgccaaactcagcagctaaaaataaaaagtattgcatagtcaggaatttgagagtggcttaggtgagtggttctggctgagggtccggcctgaggttgcagtcaaggtgttggctgaggctgcagtcatctgaaggctcatctggggctggaggacccacttctacttggcttattcacacagctgttggaggaggcctcagttccttatcatgaaggcctctcccctcagggctgcttgagtgtccttccaatatggcagcagagttcccccagaaggagtgatctgagagaggagaaaggaagccgcaatgccttttatagcctaatctctgaagttacattccatcacttcttcctgatttttgttgttgttgttagaagcaaatctaacccccactcaaggggaggagaattaggctccacctttttggagtcgcaaagaacttgtggatagattttaaaaccaccatggtacctactgtgctcattttatagatgaggaggttgaggttccatgaagcagagcagcttacccaggtctttattttttttttttttttgagacagagtctcactctcttgcctaggctggggtgcgatggtgcgatctcagctcactgcaacctctgcctctcgggttcaagcgattctcctgcctcagcctcccgagtagctgggattacaggagcccaccaccatgcctggctaattttttttgtatttttagtagagacggggtttcaccatgttggccaggctggtcttgaattcctgacctcaagtgatccacccacctcggcctccaaaagtgctgggattacaggtgtgagccaccacgctcaggcctttatttcttccttttaggaggctacagagttctgggcatcttcaggcctagcccctgtattcattagtccccagatcaccacgagagtaaatctgttataaccaaagctgttactcttttccctccacaacaaaggaccttgaagaacagctggaggaggaggaagctgccaggcagaagctgcaacttgagaaggtcacggctgaggccaagatcaagaaactggaggatgagatcctggtcatggatgatcagaacaataaactatcaaaagtgagtaggggccgggtgcagtggctcacgcctataatccgagcactttgggaggccaaggtatgtggatcacttgaggccaggagtttgagactagcctggccaacagggtaaaactccatctctactaaaaatacaaagattagccaggtgtggtggccagtgtctgtaatcccagccacttgggaggctgaggcaggagaatcacttgaacctgggaggtagaggttgcagtgagctgagatcgtgccactgcactgcagcctgggtgacagagtgactctgtttcaaaaaaaaaaaaaagtggaatcaagtttctgcattaaaaacaacaggcttaccaggatcagggagattttggggatttgggactttcagttctcaaagcagaaaagcccttagaaaaccaggacaagctggtcaccgtagtcagtagtcactaaccagccccacctgcttttagttctttgagctggatgtcagcttggcccctactgtgagccaggctctgtgttagatgcaggtatgcatggtgaaggaggacccttcccttgtggggtttatactgtagtgagatggcaaataatcgtcatttaccatggtgatcagggctctgaaggaaacgttcaccatattttaagagtgcggcaggccgggtgcggtggctcatgcctgcaatcccagcactttgggaggctgaggcaagtggattacctgaggtcaggagttggagaccagcctggccaacacggtaaaaccccatctctactaaaaatacaaaaaattagttgggtgtgttggcgggcgcctgtagtcccagctactcgggaggctgaggcaggagaatcacttgaacgtgggaggcagaggttgcagtgagctgagatagcaacactgcactccaccctgggcgacagagtgagactctgtctcaaaaaaaaaaaaagaatacagcagtgggggatagaggaagggtattcatagaagacttcctggaggaggtgacatttaagcagaaacttaaagatgaaggagcagttagaggggagtagaagagcatctcagctggttggcccactgtgcaaaggccctggggcagggaagagctggccagtggcaggaatggaaggagggtacctttagctgaccatacaatatgagggacaaactggcacgagatgagaaatggccagtttttggaaattgttatgggacttctctttaccatttaaaactctagttgtattttgttataatgtgggtttttctttcaactgtttacatggaaatcactaaaagtgaaacatagattctagagaaaagaaaaatcctaaagctatctctttctctttccccaaaaaggaacgaaaactccttgaggagaggattagtgacttaacgacaaatcttgcagaagaggaagaaaaggccaagaatcttaccaagctgaaaaacaagcatgaatctatgatttcagaactggaaggtaaaccagctaccaagagatttatttttattttattttattattttttttagagatgaggtcttgctctgttgcccaggctgcagtgcagtggtgcgatcatggctcactgcagcccgaaactcctaagctccagtgatcctcctgcctcagcctcctgagcagctgagactacaggcgtgcatcaccacacccagctaatttttttttattttttattttgtagagatggggtttcactatgatgctcagtctagtctcaaactcctgggcccaagcagtcctcccaccttggcctcccaaagtgctgggattataggcatgagccactattcctgggcttgaatgggtatttttaaaagcaggaaaatcagaaaggaaatttgaggatggcagatcatcccatgagtgacaactaactctatgccacctctcgaaatcacccttagtcatcacatgcactaataatatgataaaagggctgggtgcggtggctctcgcctgtaatcccagcactttgggaggccgaggtgggcggatcacgaggtcaagagttggagaccagcctggccaacatggtgaaaccctgtctcaaaatacaaaaattagccaggcgtggtggcgggcgcctgtaatcccagctactcgggaggctgaggcaggagaattgcttgaacccgggaggcggaggttgcagtgagctgagattgcgccactgcactccagcctgggcaacaagagcaaaactccatctcaactaataataatattatgacaatataaggtgctgttcatcgggagataatggtccagaccgtgactatgatggttactgattgggggatgtgttcatctcctccgggtaaaatgcctgggcaggaaggctcatttccgggcatctctctggggcctccccttcctgaagagcaccttggtttttgcagtgcggctaaagaaggaagagaagagccgacaggagctggagaagctgaaacggaagctggagggtgatgccagcgacttccacgagcagatcgctgacctccaggcgcagatcgcagagctcaagatgcagctggccaagaaggaggaggagctgcaggcggccctggccaggtagcggggctggcaaggggcatttgctgtgtgtccatgtatcccctgggcccctgctcattcgctcattcgcagtggctgtcttggtcaaggcggccccaggcccttggcatgaacttcgtttcccaggccaggcctcccacaagccttctcgaccctgttcactcccccagatcctcaccttcgactttcttctcttccctgcaaacacatcatgtctttgcagttgatctcacctactcccatggtgttgctgctgcctcttcgacatccaggcttttctcatctagacccccttctgaatttccgattgcccaatgagtcaatttccaccgtcatctcaaacacccctgtctaaggcgggaatgaccttcctttccccagcccctccctctaagggccctcttttttgtgaacaccaatctcctcctttgtttctgccgacccacagcaagcagcaaccttcagattctgccagtccttctaaatgtcccccacccatttcctctggtttttccctcttcctggctcttagctggatttacactaatgctaatactgcagcagccactatgaatgattatttacctgctcactcggtgctaagttcttttcaagcaatacctttgcagacacctggccaggtgtactgccggtgtctttgaggaggaagctgagcctcctaggggtaacgcaacaggagcaatgtcattgcttctaagaggcagagctgggatttaagcctcaaagctttctgattgatcccctggcctggctcttttgtcggccaatttgtgctatgttgacagtgctacggtgatgaagggaaagcatctctctggggcaggaacctgctcacaaaactttgctggctggatgcagtggctcacgcctgtaatctcagcactttgggaagccgaggtggggggattgcttgaggccagcagtttgagaccaacatgggcaacatagcaagaccctgtccctacaaaaagttaaaaaatgagccaggcatggtggtgtgtgcctgtagtcccagctactcaggaggctgagatgggaggatcacttgagcccaggaggttgaggctaaagtgagctatgatcatgccactgcactccagcctgggcaacagagcaagaccctgtctcaaaacaataataacaacaaaacaaaaacctaacttcactggcttactagggaaaatccagtttccttagcctcaccctcagagcccatccaccctctgcagtctcaccccaacccaactatttcactttctctcttgttgctgccctttcacaagtacagtaaaatcaaagtgcttgcctctcctgcagcattctgccatttaacagggcttcttgcagcccaccttgatctctggtcaccacctccaccagatgcagagccccagtctgaatatcccccgcaagcagtggctggccaaatgctgtgcatggggcgggtactcagtcactgagcaaatgcagaaagaacagacagttgccagggaagaagaactgtccaacattcagaaagcatctacacagtccctactgtgaccaggtaccttgccagtctggggtcaatgctttgcattcttgcacacacatgcacacacgtgcatacacacgtacacacacccatgcacatgtacaacctgttttgatgtcagaccttggcactcacatcctatgttaatctcatatagtctggcatgtcaagaagcagacctggggacatggatagaaggtgtttgatgtctctgcaacataactgtctggtcccagaaaagtttttggccacattgtaagagaggaaaccaagggacctgggggttcattctgctgggtctctccctggaaggcttgacgatgaaatcgctcagaagaacaatgccctgaagaagatccgggagctggagggccacatctcagacctccaggaggacctggactcagagcgggccgccaggaacaaggctgaaaagcagaagcgagacctcggcgaggagctggaggccctaaagacagagctggaagacacactggacagcacagccactcagcaggagctcaggtgaggggcccatcaatcccaccatcctgctatcccactgcaccaatgggatgggggcagaagaggggacaaacccaaagcaaatcgtgcatcagcccctgtgcatttaccttcctggccgcggtttgctttaacttatagaagcatggttggctgtttcttttttttctttcttttttttttttttttgaggcagtctggctttgttgcctaggctggagtgcagttgtgccatcttggctcactgcaacctccacctctgagatttaagcgattctcatgcctcagcctcctgagtagctgggattacaggtatgtgccaccacacccggctaattttttgtttttagtagagatggagttttgccatgttgcccaggctggacttgaactcctggcctcaagtgatccacccacttccgcctcccaaactgctggtattacatgtgtgagccactgcacccgaccctcatcatcttatttctcatcagaagagtagtatataccagggatgtacaatcttttggcttcccttggccacattggaagaaaaagatttgtcttgggccacacataagatacactaacactaataatagctgatcaactaaaaaaattttacaaattggaaaaaacatctcatactgttttaagaaagtttatgactctgtgtcaggctgcattcaaaaccatcctcattggtaagcttggatatactcagagaacaatttgaaaactatagaaaagcagacataaaaaaaaatcacctttagggtcgggctcacgcctataatctcagcactttgggaggccaaagacaggtggatcacttgaggtcaggagttcaagaccagcctggccaacatggtgaaaccctgtctctactataaatccaaaaattacctgggcgtggtggcgcatgcctgtaaatcccagctactcaggaggctgaggcagtagagtcacttgaatctgggaggcagaggttgcagtgagctgagatcgcaccatcgcactccagcctgggtgacacagtgagtgagactccatctcaaaaaaaaacaaaaaacaaaaaaatcacccttagtcacaccagttaacattcttgagaaattccttcctgtctgtgtgtgtatcagtcagtccccaagctccaattcccaagtatgtgtgtgtatcacttttgtgttaaattttaaaaataaaattgatcagattggttttcaattgaagattcacttcaaatgaacaaacaataacaaactgcctgccagatcacgaatcctgactctagtgaaactaggtcattgattcattcagtaaacacataaatgtattttgatgcaatctgtggtgttggcatagcatgtatcatagcatatagctatgctagctgtgccaacaccatataccctggggtttacttcccccactttgggttttgtgcagtgtcacatgcacatagagcacagcgttctgctcccttgccgcttggcctttgatacagaagagcccagtgcatgggccaggtatggtggctcatgcctgtaatcccagcactttgggaggctgaagcagacagatcacctgaggtcaggagttcgagaccagcctggccaacatcatgaaaacctgtctctactaaaaagacaaaaattagccgggcgtggtggtgggcgtcggtaatcccagctacttgggagactgaggcaggagaatcccttgaacctgggaggcagaggttgcagtgagctgacatcattccactgtactccagtctggacgacggagcaagactcgataagaaaaacaaacaaacaaaacaaaaaaccaggctgagtgcggtggctcacacctgtaatcccagcactttgggaggctgaggcgggtggatcacctgaggtcaggagttcgaaaccagcctgaccaacatgttgaaaccccatctctactaaaaatataaaattagccgggcgtggtggtgggcacctgtaatcccagctacttaggaggccgaggcaggagaatcgcttgaacccgggaggtggaggttgcagggggccaagattgcgctgtcgcactccagcctgggcaacaggagtgaaactccatctcaaaaacaaacaaacaaaaccatggactcaaggtcaaggtttagcttctaattctggctccatcacacaatggctgtgacaccatgggtaaaactgcttaccctctcttagccttagtttcctcatttgtaaaatggaaataataacacacctgcctctttgggttgctctgaggattagatgatgtatataaaaaacttagctcagggcctggcatatagtaactgctcattaaataagagccaacattaatatttaagcaaaattttgcagttcacagacatcctttcaattctattactttgtgtatttgtttgccagtcattacagatgtcctaggcaggtgatatgctccacattttgcagctgaggaaattttaggtccagagatgttaggtgaatgacccaaggtcacacagctagagaggggtggtgatgaggactgcagctctgggtcctggaagagctctcattcttttgcacggcactgagatgaccctctgtctccacccaactgccattcactgtgttcctcccaccaagggccaagagggagcaggaggtgacggtgctgaagaaggccctggatgaagagacgcggtcccatgaggctcaggtccaggagatgaggcagaaacacgcacaggcggtggaggagctcacagagcagcttgagcagttcaagagggtaatgctttttggtgatgctttttggtgatgacacataagagtgacatcagcagcctcaaattactacaggtcagggtctgcataaagacaaaaaacaagttacataagattctaatgatgatgatagcagcttatatttatttacaaaatgcttcccatacaggctgggtgaggtggctcacgcctgtaatcccagtacttggggaggctgaggcgggaggatcgcttgagctcaggagttggagaccagcctgggcaacatagtgagaccttgtttctactaaaattttaaaaaagtaggccaggcgtggtggctcaagcctgtaatcccagcactttgggaggccaaactgggtggatcacctgaggtcaggagttcgagaccagcctggccaacatggcgaaaccctatctctactacaaatacaaaaaattagccgggcgcggtggtgcatgcctgtaatcccagctactcgggaggctgaggcaggagaatcacttgaacccaggaggcagaggttgcagtgagcagagatcatgccattgcactccagcctgagcaacagagcaggattccatctcaaaaaaataaaataaaataaaatattggccaggcctggtagtgcattcctgtggtcccagctatttgggaggctgaggtgggaggatcgtttgagcctgggaggttgaggctgcagtgagccctgtcatgccactgcactctagcctggacgacacagtgagaccttaatcaaacaataaaaataggctgggcacggtggctcaccatgtctgtaatcccagcaatttgggaggcaaggcgggcaaatcacttgagctcaggagttcgagaccagcctggccaacatggtgaaaccccatctctaccaaaaatataaagaattagctgggtgtggtggcatgtgcctgtaatcttagctactcgggaggctgaggcaggacaatcacttggacccaggaggaagaggttgcagtgagctcagatcgtgctactgcactccagtctgggcgacagagtgagccgccatctcaaaaaaagaaaaaaaaaaaagaatgaatagaaatgcttctcatacagtatgtcaattaatcttcacaaccaccctgtgagacgtgtactattaaactcattttacaagcaaagaaactgaggtcctaggtgcctagaggtgaagagacttacccaaggtcacactgctggtaagtgacagagccatgatttgcacccaaacagtctggtcctagaccccactttctggcctctacaggactgaaggcctataggatgggtggggcctatcaatatactgcccttcagggataagcaaaggtgtaacaacactttcggggagatttaaatgaaacttaaaactgggatcattctatccactttaatttctctgcagactggaggaaggccaggcatggcggctcatgcctcccgtaatcctaacactttgggaggccaaggagggaggattgcttgagcccaggactttcagatcgcctgggcaacatagcgatttttcttttgtaaaaaaaaaaaagactggaggaaacttgtcattatttgatttcaatggcagaacagctctctccggcataatttgagaatgactaggtcaaatcactctcccgttgttggaactctttgcggtgtatgggagtgggagctggtaaatagcagtaccgaatgctgaatcttgggtgctcttctctcctttggggtagtgcctgtgcttcattccccagggtaagttttttagcttgcgaccttcggccagattgttttcctgaaagcctgagttacattaccctcagcgttgcagctcctccacatccccttcagtggaagcttttggttctgctagattaagtgggtgcagcattgcctaaaaattttggggaatttgcatttggttctatcactagtgtattggtccgttgttgcactgctctacagaaatacccaagattggattatttgtttattttttgagcagtggagtcttactctgtcactcaggctggagttcagtggcgtgatcttggctcactgcaacctccacctcctgggttcaaatgattctcctgcctcagcctcccaagtagctgggactacaggcacacaccaccatgcccggctaatttttttttttttttttttttttagtagagatggggttttgccatgttggccaggctgatctcgaactcctgacctcaggtgatccacctgccttggcctcccaaagtgctgagatgacaggtgtgagccactgcaccaccctgagattgggtaatttctaaagaagagaggtttaattggctcacggttctgcaggctgtacagaaagcatagcagcttctgcttctggggaggcctcaggaaacttaccatcatggtggaaggcaacggggaggcaggcatgttttacatgaccagagcaggcagaagagagagaatggggagctgccagacacttttaaacaaccagatctcatgagggcagcaccaaagggatagtgctaaaccattagaaactgcccccaaaggccgggcgcggtggctcatgcttataatcccagcactttgggaggctgagataggcggatcaccaagtcaggagttcaagactagcctgaccaacatagtgaaaccccatctctactaaaaatacataaaattaggctgggtgcagtggctcacgcctgtaatcccagcactttgggagcccgaggcaggcagatcacctgaggtcaggagtttgagaccagtctggccaacatggcaaaaccccgtctctactaaaaatacaaaaattagctggacgtggtggcggtcgcctgtaatcccagctacttgggaggctgagacatgaaaatcacttgaacccaggaggtaaaggttgcagtgagccaagattgtgccactgcaccccagcctgggcaacagagtgagactcagtttcaaaaaaaaaaaaaaaaaattatggttggaagagtgaggccccagacagaatcactgaccctccccatgcttggggttcattagacgtgaacaggagctagaagccaagcccattcccagccaggcctctttgggaagacgcagttattaagaccaccagcagacggcatgtccattactgacccgcacaaagcaggtagaggtgcaaacctctgcccatctcaggtgcagggaaacagaggcctttgcctctaacaacttgaattctgatgtagagacctggttccatctgcttgtgggggaaacgtttaacatcagctcctacctgggctccccaggccctcgtgcggtttggccccagttctggggtcttaggctgggctaaggtttctgggagcccatgtcccctagggtccccgcttcactgctttgttaccaccaagagactccctgtccccatctgaggtctggcagctcttagtcatgtcttggagggaggacgggcatccagggctgaccggtcaacgtccagcacctcccagggactatgggaagactgagtggtgggtctcgtcctctcgggatacttgcgcttctctttccccttctctacaacctggaaagaagcccctcaccgcgtcctacttttgcccaacacgcttttttttttgagacaaagtctcactctgtcgcccaggctggagtgcactggcgggatctcggctcactgcaacccccgcctcctgggttcaggcaattctcctgcttcagcctcctcagcagctgggattacaggtgactgccaccatgcccggctaatttttatatttttagtagagacggggtttcaccatgttggccaggctggtctcaaactcctgacctcaagtgacctgcctgcataggcctcccaaagtgctgggattctaggcctgagccaccgcgcctggccccaacacactttttttttcctgtagggcaactcacatgcctacaggagctggttccataaaataagtttcccttaactaggacagaagtagcagtgtcaatcacacgacacctgtgaaggacgggggcggtgaaaggtgactgccccacctgcagagccagccgctacttagatgtggcagattgttgccttgaaggaaagcaagaccctctgtttccagatctttcgttgttgttggttttttgtttttgtttttaagtttaggattactgaggcatatgtagtaaaatttatccattttactgctccattaattttaacaaatgtgtattgtgtaactaccaccaccacagtcaccacatagaatgttagttattgattgattgattgagatggagtctcactctgttacccaggctggaatgcagtggcatgatcttggttcactgcaacctccacctcccaggttcaagcaatacttgtgccttagccaccccagtagctgggactacaggcgtgcgccaccatgcccggctaatttttccatttttagtagagatgcagtttcgccatgttggccaggctggtctcgaactcctcacctcaagtgatccacctgccttggcctcccaaagctacttatttctgaaacagggtctcactttgttgcccaggctggagtgcagtggtgtgatcatagctcactgcagcctccaattcctgggctcaagcaagcctgccatccgcctcctgagtagctgggattgctggtgtgtgccccccacacccagctaatgttttattttagtagagatgggggtctcactacattgcccaggctggtcttgtactcctggccttaagcgatccttctgcctgcttcccaaagtgctggggatgacaagtatgagctgccatggcatgccttcaaacattaaagttttttgaaaaagaagctgggaatccagatttttatgtgacatttattaaaatgtcggcaactcatttttttaaaagtagtgaaagggtcaaaggggacatgtcagcaggttggataccgcttgtgggattccagattgcaacccatgagctttaggaaaatagaatccaaaatatcagctgggtgcggcagctcacgcctgtaatcccagcacttagggaggccaagatgggtggatcacttgaggtcaggagttcgagagcagcctggctaacatggtgaaacctcgtctctactaaaaatacaaaaattagtcgggcatggtggcgggcgcctgtaatcccagctacttgggcagctgaggcaggagaatagtttgaacctgggaggcggaggttgcagtgagccaagattgtgccacggcactccagcctgggtaacagagttaagactccatctcaaaaaaaaaataacaacaaaaaaaccccaaatctcttactggtgattgtgtgccccctgttgtgtgccttcctggacctctctgagggaggaaagggcagggcctgaaacgttctcccggccacagcctccctgttatccctcccctctgcttccttcgccaggccaaggcgaacctagacaagaataagcagacgctggagaaagagaacgcagacctggccggggagctgcgggtcctgggccaggccaagcaggaggtggaacataagaagaagaagctggaggcgcaggtgcaggagctgcagtccaagtgcagcgatggggagcgggcccgggcggagctcaatgacaaagtccacaagctgcaggtgaggaggtggcgcggtggtgtggtgggcagtgctgggtggtgcccagttctgtggggaggagcctcttcccggctcgctgaggtctctcttgctgcaaggcaagtcctttcctctagttgcgttcctggaggagaggcgatgatctccctgttcaattaaatattaaaaaaaccttctggccaggcacggtggctcatgcctgtaatcccagcactttgggagacagaggtgggtggatcacctgaggtcaggggtttgagaccagtctggccaacatggtgaaaagtctctactaaaaatacaaaaattagccaggcgtggtcgtgggcacctgtagtcccatctactcgggaggctgaggcaggagaatagcttgaacccaggaggcagaggttgcagtgtgcggagaccgcaccattgtactccagcctgggctaaaagggcaaaactctgtctcaggaaaaaaaaaaaaaaagaaaaaaaacccttccttttccaatttgataagtatttattgagcacctgctgtatgccaggcactgtgcttaatcctgagatccaacagcaaggaagaagagacactgtcgctgccccagtaggactccagccgagtaaggggaagggaagggaagggaaagacatgaataatcacacaaatgaatgtcaaatgatgcagcaaagggaaggcacatgatgcccaagtgtaaataaccagggggcctaacctgggggaggaggagccacgaaaggcttccctaaggagcatggataagtctaccaggcagagggaacagcgtgtgcaaaggccctgtggtaagtagaaaaattaggagagagacatacagccagtagagctggagtgcccagctggggttgggggtagggggagatagtacagagtggggttggagggggagcttgtacccagatgatgtagggcttttgagaacctattacatgtatgttgatccttactctgggcaatgtgaagctgttgaggggttttaagctgctgaatgacatggtctttttgtctttggtcttctttcacttggcatagccatttaccctgccttgccactcatggggacgtggccaaagttttcacaaatgtttaacatgtccacagccagggaccaaggggcgagggaagaattaagtgagatgtttttttctcacatgcagttgagagcagggcttttgccgccctcatataagcagtgtcaagatcattcatatcctccttgtcaatggaagagatggaggggtaggctaacagcctcaaagggacttatgcagagacactagggagtaaaagccagagaatacagagaggacgtttttacctttagggcctgcgtctctggctttggccatcagggtcaaagagtaggagtgaggaaggaagggatgggacagcatccctgggacgttcaagtaccatcctggtctcccttctccagccttagagagtggaccagccagagcacctcgtctggactctcagacctgctgctttgtctctaccaaccttggcagggatctaggatccatttagtgggatcaggtcccagtcaataccattggggctcaaataagttcttagaaccacagagtctagggccagggtcccaactcataggtgacggagttcccttcaagccacagattctgttttttttgtgtgtgtgtgtgtttttttttttttttatcagagtcccatacctcacgggtattttctcaatcagtgaacacctcaagtactagcccatgtgttttgagtaaaaagggctcctttcaacgaggatccccttctagaggctttgactaaccagtctcttggcacccttagaatgaagttgagagcgtcacagggatgcttaacgaggccgaggggaaggccattaagctggccaaggacgtggcgtccctcagttcccagctccaggacacccaggtgagtgtcctgccacatcatccaggggacctggggggtggccttcctcggggcaggtccctgggacctctttgcatcccttttgcaggagctgcttcaagaagaaacccggcagaagctcaacgtgtctacgaagctgcgccagctggaggaggagcggaacagcctgcaagaccagctggacgaggagatggaggccaagcagaacctggagcgccacatctccactctcaacatccaggtgcctgccccgtgtccttgcttccttcatgggtcctctcaacttctctgcgctgagatcccccgcaggcagatcgcggtggagtgttggtgcgatggtgcttgaccccccagcttcccctgctattgggtttctccaacgaggagacatggtcttcgcttctcagagtctgtggggccagggacaggggccactcatggtccccctctcaccctaccctggacgctgtccttgtagctctccgactcgaagaagaagctgcaggactttgccagcaccgtggaagctctggaagaggggaagaagaggttccagaaggagatcgagaacctcacccagcagtacgaggagaaggcggccgcttatgataaactggaaaagaccaagaacaggcttcagcaggagctggacgacctggttgttgatttggacaaccagcggcaactcgtgtccaacctggaaaagaagcagaggaaatttgatcaggtagagggcgtggggtgtcccccactctggccatggacgctgggttggggaatcagctctgcagagtatgacgcgtggctctggcctgtgcctgcatcccctctccactctgtggggagccatgggaggctgtcttatcttgtcttgggcgaccatggagcattaacgctaccaggtcacagtaaggatggcaaagaagccttgatgactgtgacttttctgggtaccagcaccatgagggtcacctgcacacatggtgatgccttagtttctagcctgaagaaggaatgaggtgcttatttattcactaaatgtatttactgaatacctattgagtagtattccaagtaattcagtttctatacttttaataccactcttccctaagatttcattctgtaaaattccaagtacacagcaaagttgacagaattgtacggtgaacacctttaaggccaccacctggattcagtcattgacactgtattatatgaactttatcagatacttattttgagacaggatctagctctgtcacccaggctggagtgcagtggtgtgatctcagctccccgcaacctccaccactgggttcaagcgattctcctgcttcagcctttcatgtagccgggattataggagcacaccactatgtctggctaatttttgtatttttagtagagatggggttttgccatgttgtccaggctggtctccaactcctggcctcacatgatctgcctgccttggcctcccaaagtgctgggattataggtatgagccactatgcccggcccacatatttatttataaagactaattctatctatcatgccttatctcttgggtacatttcagagcaaattacagatgtcagtacatttccccttccacacctcaacattgcatattaattagagtttatttttaaacacaattttgcttcttttggggtaaaacttacatgtgatgagattcacaaatcttaattgtacgataaatggagacccctgtatgacccaaacccctaaataccaacttttaagatacattattatttagtaaatatgatttagtttacaagtgactcagggttattctaaaaatcagtttgagaggccaggcacggtggctcacgcctgtaatcctagcactttgggaggctgaggcaggtggatcacttgaggtcaggggtttgagaccagcctggccaacatcgtgcaactttgtctctactaaaaataccaaaattagccgggcgtggtggcgcacgcctgtaatccctgctactctggaagctgaggcaggagaatcgcttgaacccagggtggggtggaggttgcagtgagccaagattgcgccactacaccccagcctgagtgatggagtgaaaaccctgtctcaaaaataaataaaatgaggattgtacagtgaggctaaatgccagatgcctgcaggttccctacccctccctgactgacctcctagtgtcaggattctagataacatcccagtttctcctcttcccatcagctacctctcctctgggctgtcagctcatcttcaatgcttcgttatctggttgaaggcctgaggttgcttttattttcctgtcacatagagtgtagtgcagtggcacacatagtgtgggatttttgtgttgactgtgccatttagaggtccctgtctttgctgaatactggaagtttggcttttggatgttacaatttataatctgctctgttctctctgaagatgagattaacgtgagcatggaatgttctctgagttgcttctccaagcagagagatatgtgtgcagggccacccatgcttaccatttccctactgaggctcttaggatacttttgtaagatattaatagctacttgtggccatgaaacaaactaataactagcttctggcagctttaaatctcactttgacctcagtgtgctctaagcaacgtgggcaggtctagtggtttcgaagcacaaggatttggccaggtgtggtggctcacacctgtaatctccgtgctttgggaggccgaggcaggaggctcacttgagggtcaggagttcgagaccagcctggtcaacatggcaaaaccacatctctacttaaaatacaaaaattagccaggtgtggtggtgggcacctgtaatcccaactactctggaggctgaggcaggagaatcgcttgaacccacgaggcggaggttgcagtgaaccaagactgcaccattgcactccagcctgggtgacaaagtgagactccatctaaaacaaacaaacacacaaaccaacaaaaaaaaacaagtcagctgatttctggctctgcataaggttgatgtagaagtcagaacgccagatgattatataaattactcccatagctaacctacactgcttacacctgcacctcaatacattcagcaggacacagggcttcccccggtatttacaattcagtgacgctgaccccggatatgcctagaagtcacctctgggtcttgtgttgtagttgttagccgaggagaaaaacatctcttccaaatacgcggatgagagggacagagctgaggcagaagccagggagaaggaaaccaaggccctgtccctggctcgggcccttgaagaggccttggaagccaaagaggaactcgagcggaccaacaaaatgctcaaagccgaaatggaagacctggtcagctccaaggatgacgtgggcaagaacgtaagtggctctgggtggtttttctcgtccatgtttcgcctgcccaccctctgtgctattcaccagtccatgcgaggctagctcctggcctttttcatagcgaactatcatcggaaatggaaggaggtttttggactggtgcaggggctgggaggggctgagaatggcagtcgaggatgggtctgagttggggggtccgaggataaggctggggtctgaactctcaggggtcatcttgagtcccggccatgcatcctgtgggaggccaaagccacctccctgatctcctgaggtgccgctcacggtgggtttctcaatcgtcttcatgaagttgagcctcatagaatggggctgcccgctctgccggcaggtccatgagctggagaagtccaagcgggccctggagacccagatggaggagatgaagacgcagctggaagagctggaggacgagctgcaagccacggaggacgccaaactgcggctggaagtcaacatgcaggcgctcaagggccagttcgaaagggatctccaagcccgggacgagcagaatgaggagaagaggaggcaactgcagagacaggtgcgtgctgccggggaggccagcagagggaggtcgggtggcctttttcattcctatcaccactctcatggttggtgtggaaacttcgttttctttatttttttttgaaacagagtctcgctctgtcgcccaggctggagtgcagtggcgtaatctcagctcactgcaacctccacctcctgcctcagcctcccgagtagcttggattacaggcgcatgccaccatacctagctaatttttttttttttttcagtggagacaaggtttcaccatgttggccaggctggtcttgaactcctggcctcaagtgatccattctcctgttggcctcccaaagtgctgggattacagacatgagccacccacgcccggcgtgattccgttttctcatctgcaactggggatgagatgcccacctcacaagggggctgtgctggggaaggggtgcagtgatgtgctgcctaggtgagccaaaggacctcccaggggcaagtggggcagcacacatctctattcctcgcccagcttcacgagtatgagacggaactggaagacgagcgaaagcaacgtgccctggcagctgcagcaaagaagaagctggaaggggacctgaaagacctggagcttcaggccgactctgccatcaaggggagggaggaagccatcaagcagctacgcaaactgcaggtgggtgacactaggagcttggggcatgggtggagggagggcacagttcccctcaggccaccgaagtcagcagagcgggctccaggaagcaagcctgcacctgccattggtgtgggttcagctggggtttttctggaaccattcaggatttggtggctgtctcctgccctgggtagggcagcattattaggtatttggccactgccctcagatcacatcaggggctcagcttctcaggcaggtctgtggagcccacccagaatggtgctcccagcgcaccaccagccacctggaactgagagccatgctcgtgcaatgggaacttctttgtggtcaactgcagaaaatccaaggggtgggtgtgcaaagctgaactgggcagcagaacttgggggagtaaggacatctgagcttgtcctccctgttgactcatgcaggctcagatgaaggactttcaaagagagctggaagatgcccgtgcctccagagatgagatctttgccacagccaaagagaatgagaagaaagccaagagcttggaagcagacctcatgcagctacaagaggtaaagcctcgccttgctaggagagcctcagatgcgggtgtcacggtagcaccccttggcagctccagtctgtgcattcccagatttcatttcgtcctcctctggggtccacctgtctagaaagacacacgcttccctcctctatgtattcacggggcctcccctgagctcagaggaagaacatgtactttcaagggtggctgagttgtcagggtggactcttggtggggcttggcctttccctggcagacaacagccttcctccctcccacctaggacctcgccgccgctgagagggctcgcaaacaagcggacctcgagaaggaggaactggcagaggagctggccagtagcctgtcgggaaggtaggaaactgaatggaggaagagggctctgaagcagaggatggggggacaggcagcatcctcgacccccattttattttttaaattttttcgagacagagtttcattctgtcacccaggctggagggcagtggcacaatcttggctcactgcaacctccacctcccaggttcaagcaattctcctgcctcagccttctgagtagctgagactacaggtgtgtaccaccatgcctggctaatttttatatttttagtagaggtggggtttcaccatgttggccaggctagtcttgaactcctgaccttaggtgatcctcctaccttggcctcccaaagtgctgtgattacaggtgtgagccaccgtgcctggccctggacccccatttcaatgctgctgctgacgaagcgtcctctgagattggggacagacccatggtggttaggttttccgtcagcgctttcatgcctgtttgggggtgtggctgctttcattcattcccaataagtagctgtgtggggagaaggggaggccaggaagagtcagggaggagtgtgctggtccccatcccaatcccagctttgctgacacggacccggcctgagtcccggctgtccacttcctggctgtgtaactacagatgagtcttctaatcttctccaagcctcagtttcacccattagatgatgagggcaatacccctgaggcatgactccaaggagggggcatcttttaaggcgggggagggtagaggcccccaccatggccgcccttcccccaggaacgcactccaggacgagaagcgccgcctggaggcccggatcgcccagctggaggaggagctggaggaggagcagggcaacatggaggccatgagcgaccgggtccgcaaagccacacagcaggtgagggccgcctggacaccacagtcacgctgcctactgtctctcctgcagcaggatcctgcaccagtcaacacacgcgtggcggcttcctgtgtgcaggccctggattgagggacaagagggtggtggggcctgagagtagagatccagggcccttacaccagtgcccaggctgctgtcttcagaatactcctctccacgctgcagtgtctcattttccagccacggcgtggctggctccccgtacctcacggccatccctggagtccgggccttgggatgctctttcattgcgttttcccctagctgaagctctgaccttatccagtgagcccttggtgatgtcactgagcactagttccatggtgggcactagggaccatccagtaacctgcagccccttgtggtgtagggtgaacaggcatcattctccaggcgactccaggacagagaaagcaagggacaagtcactcgctcagcctgggtggcactgacacttgtggaagcacctcttttttttggagacagggtctctctgtggcccaggctggagtgcagtggcgcaatcttggctcactgcaacctctgcctcccaagttcaagggattctcctgcttcaacctcccaagtagctgggactacaggcacgtgccaccactgcccggctaatttttgtatttttaatagagacggggtttcaccatgttggccaggcaggtctcgaactcctgagctcaagtgatttacctgcctctgcttccaaaagtgctgggattacaggcgtgcgccaccacgcccggcctggaagaagctcttgagtggagttttacaggatgaaggagaggacagggtgcccgggatcaagggactcgtgcagaggccaaacaaggcaggaagaggcatggtctcagtgcgctctcttgggcttccctgagtccgcctcatggccttcactctcctccccaggccgagcagctcagcaacgagctggccacagagcgcagcacggcccagaagaatgagagtgcccggcagcagctcgagcggcagaacaaggagctccggagcaagctccacgagatggagggggccgtcaagtccaagttcaagtccaccatcgcggcgctggaggccaagattgcacagctggaggagcaggtcgagcaggaggccaggtatgcgggtgtggagttccgaacccagtttgcaggggggtgatggacagcaggagtcatagtgaagtcagggaacctcttccagcatcagttctggcttgtaagaagcaagctctgtgatgcctacagtgcaggtatgttgtgagaactgaacgtaaacacagcaaagtgccctgctggttcctggcctagggcaagcacctaaagtgtgagctgctcttagcatctccatggtcctcctgacattaacctgccttcccagcagtacatatgacttttcccagcctctgcagggatagcatgctgacagatcaaaaatccaaccaggctggacgtggtggctcacgcctgtaatcccagcaatttgggaggctgaggcaggtggatcacttgaggtcaggagtttgagaccggcctggccaacatggtgaaaccctgtctgtaccaaaaattagccgagtgtggtggcacatgcctattatctcagctactcaggagactgaggcaggagaatcactccaacgtgacacgtggaggttgcagtgagccgagattgtgccactgcactgcagcctgggtgacacagtgggacccttccacacacatacacacacacaaaaaaaaccccaaaaaacaaaagtccaaccggcagcccatttggtacacacactggaagccttcttaattatgggtcgaatgaggcatatgatcacagcacatttcttaccattggattctaaggattctcacccattctcttctagtagctttttcagtaattcgcacgccctgcaatgcacccatttaaagtgtataattcaagggctattcatatattcacaaacatgtaaaaacgatcaccacagtcattttgagaacattttcatcggctcaaacagaaaccccaggccatatgtggtatttcatgcccataatcccggcactttgggaggctgaggtaggtgggagcagcacttgagtccaggagttcgagaccagtctgggcagcatagcaagacttttttatttttatttttttgagacatagtctcactctgtttcccaggctggtgtgcagtggtgcgatctcagctcactgcaacctccgcctcaccctcccaagtagctgggactacaggtgcacaccactgtacccagcttgtaattgtattttttagtagggatggggtttcaccatgttggccaggctggtctcgaactcctgaccacaggtgatctgcccacctcggcctcccagagtactgggattacaggcatgagccaccacgcctggccagagactccgtttctatgaaaaacttttaaaagtctgagcatgctggtgtacgcctgtagtcccagctacttgggaggctgaggtgggaggattgcttgagccaggagttcaaggctgcagtgaactatgaactagggtgaagagcaggcattggagcaccactgcactccaacctgggtcacacagcaagaccttgcctcctccccgcaaaaaaaatagaaaccccatgccctgtaaccactcccttcagtccctggcaaccataatctactttctgtctctatgaatttatctattctggacacttgatatcaacggaatcacacactatgttgtctgctatgtgtcttctttcacttggcaagaattccaggctcatccatgctgtggcatgcattgatactttattccttttcatggctgaatactattccaccatctgactgattcttgagaggagtccagatacggggctcaggaaagcactcaagatgccacctccaggtgacacaccagctacaaggggtgccaccctccgctgaaaccacctgttttccttgctgtttgcagagagaaacaggcggccaccaagtcgctgaagcagaaagacaagaagctgaaggaaatcttgctgcaggtggaggacgagcgcaagatggccgagcagtacaaggagcaggtagcccctgccacccagcctccctcgagcccccagcccccagccggcctcccctaaccacccctccaactctccgcgacaggcagagaaaggcaatgccagggtcaagcagctcaagaggcagctggaggaggcagaggaggagtcccagcgcatcaacgccaaccgcaggaagctgcagcgggagctggatgaggccacggagagcaacgaggccatgggccgcgaggtgaacgcactcaagagcaagctcaggtgaggagcccgtggcccgggaggaccccgtctctcaggccagagaaaagcactgggggctcgggctcctttcggcctgcaaatgccccttgtgcccacagccgccactcccttctgtggtttattcctgcttctccttaatcactaagcttagtgtgggccaggcactgagatcagacccgggccctgccttgcctggtagcagctaaccttctagatcctttaacgatcgaccgtctcccatccggtcctccggctgaggaggaggaagaggctatccccactgtctcctccagcccctccttcattgcatcactgagtcttcacgacatccattgaagctgcaacaccaccccccgccacttcacctccttcctgacatgctctgctcctcctttctccccctcagcactgctgccatctgggctgcattattctcgggtatgggggctgtccgacattccccatcagaaggaaaaagatccctgaaaagtagcaggtgcttacatttctggcctctacccaccggctgcagtagtcccccaccaccctgcaatgtgacaaccaaaaatgtctctagatgttgccagaagtcctctagagatgggagggtacgactgccaccccgctgagaattcctgctgtcactggagtgggggctgttttctctcccatgcctctggtaccttgggggtcccccctgctcccaagggctgcttccaccaccctgtccatccatcccgattggctcccaggaggttttagctccgggcttcctgtctcccacaccactcctcacagttctccatgatttcaacatccaggtgggcgacgcagcctctcggttccttgaccctctgggtgatcctgctgcttctaccgggccaaccagtactcctaggagccctcacaatttgaccctcaggcatcccattgtctgcctggtgccacctttctttggctctgtccccaacggggtcttcactccattaatgccatcagcctctgacccagctccaaaccagctgtctagtaacccccgtcgcgcatcctcaacatccggttccccctcttgcattgctgcaatcatttggtgaaagcacaacccaaatgaaactcaagcttggctgggcacgggactcacacctataatcccagcactttgggaggccaaggcaggtgaatcgctttgagctcaggagttcaagagcagcaagaccccatctctacaacaaacaaacaaaaatcagccaggtgggatggcgcaaacctaaaatcccagctactcaggaggctgaggtgggacgatcagtggagccccagaggtcaaggctgcagtgagccatgatctagccaatgcacttaccctggatggacagagtgagaccctgtctcaaaaaacccaaaacccactctccaccttttcccacagagcaggccttgctcaggggtcctcccacacccctccctcatcttctcactctctgctgcttttcactttttctttgaacttatgatcgctcctccccattctctctcagctggggaccttacttcctacttaactcaaaagcagaaatgatcatgaaacgtgcacaagctcccactgcctcatcatcctacctccgtgcacctctgtacacttctattttttttccatttctatgctgaaccctctggcaccaaccgaggccaacacctccattggacccgaccctcttgttcactcaagcacatagctccaaaaatccttattttgcaaggttttctctttcatttgctccatcagcaaatggaataacctcttagccccatgtctaccttgctacccttactacaaaactggatgtgaatgccgaaaccctgtctctaccaaaaaatataaaaattagccaggtgtggtggtgcatgcctatagttccagctactcaggaggctgaggcacaagaatggcttaaaaccgggagagagaggttgcagtccagcctgggtgacagagtgagactcggtctcaaaaaaaaaaaaactgtatgtgaagagttgctggttcccctcgcccccacccatcactctcccagaagcctcccatgggtgacactaatggccagaggtcccctgacagggcagcagcacgtgacgcagtccatcatgcctctggcctaattcacttgcttccctggacttccccgacaccatccacacctgcttgtcccccgacctgtggggttgtccctcttcctctcctctgctgatccctcacctcgaaacctgcttgccactagaccgccccagggtatcaacttagttctcttttgggcagagtcttgctctgttgcccaggctggagtgcagtagcactatctcagctcactgcaacctctgcctcccagttcaagctatttttggcctatttttatatttttagtagagatggggttgcaccatgttgcccaggctggtcttgaactcctgatcttgtgatccacccgcctcagcctccccacgtgctgggattacaggcatggaccactgcacggccttagttgttttcatctctccccagcgctaggtgagaggtctcaactaatcttggcgctttagaattccatgtatatctaatgactcctcagttcatctctgagaagccctagcttcttcctagaacctcagaccaccctcccgttcccacatggatgtctaataggcagctcacaccaaacatgctgcaccccaagtcctgactgaaactcttcacccccaaactggctcctctctccagctcagcagctaaaatgatgaagttgccaacaattcacatcacaaacctcgtggtccttcttaacgttttggtctcctttataccccacatcccatctatgggagaatctggtcaactttccctaaagaatcctgcccaggctgggtgcagtggctcaccccttaatcccagcactttgggaggccaacgcaggctgatcacctgaggtcaggagttcaaggccagcctgaccaacatggtgaaaccccgtctctactaaaaacacaaaaattagccgggtatggtggggcgtgcctgtaatcccagctactagggaggctgaggcaggagaatcgcttgaacctgggagacacaggttacagtgagctgagatcgcaccactgcacttcagcctgggtgacagaccaaaactcggtctcaaaaaaaaaatctccagtgtctaggacagcaccaggcagagtgaacctttatccctcgggtcctagatattttccccgcttcattctcataccaccacagccatgtgctgagcctcttactacctttaataccaatgacttgatcttttaacagttttaatcatacatgaatataacggcaaataaacatacctcctctatatttttaaaccagcatcacctctatcaactggttacgatgaaagtaatatgataaaaatagtatcaagttcaatatctagctattgtggccacaacttgatcaccaagacctgaagcctacttctccactaaaaagggagtgacaacagccattagcaccaaatagactctctctgacatcataattagacttgtttaaaaagagttggaaaggaaatgactttctcagggcccagttcagttagcggatggcatgcccggaagccatctgaaatcacctctagagtttggggaccactgcgtgagacagggaaaagtccaaacccctctgagaaggggaagagagcagctggcgcagggcaccaagccttcagggaaaagccccactcgctgcatggtgagcgcttgttggtcccccatggataggagagaaaccaggcctaggctcccaaagtacagcaggggcctggaagcatctcccagggttgaggggtcagtggaggagagctgttctcactgtgaagactcctggggcaaagcgcggtggctcacgcctgtaatcccagcactttgggaggctgaggtgggctgatcacctgaggtcaggagttcgagaccagcctggccaacatggtgaaacttcatctctactaaaaacacaaaaatcagctaggcgtggtggcagatgcctgtaatcccagctactcgtgaggctgagacaggacactcctttgcaacccaggaggaggagcctgcagtgagccaagatcaagcctctatactccagccttcagagcaagactctgtctccaaaaaaaaaacaaaaaacaaaaaccctcagatgtgctctgctggcaaccagtccccctgcctctcctgagtggctgggctgagcgatggggatacagccactctgactccctaccccactgctgtctctgcttccctttctcaggcccagtgatttcttttctttttattatttatttttagacggagtctagctctgttgccaggctggagtgcagtggcgcgatctcggctcactgcaacctttgcctcccaggttcaagcgattctcctgcctcagcctcccaagtagctgagattacaggtgcgtgccaccacacctggctaatttttgtatttttagtagtggcaaggtttcaccatactggctgggatggtctcgatctcctgacctcgtgatccacctgcctcggtctcccaaagtgctggggttacaggcgtgagccaccatgcccggccggcccagtgattctttagcacacactggacacctcctgtgggttctgccccagacacttgagccttcttgggcagccaagggcaaagtggaacaaaaagaccatttttgccagttccgacacgaatacacacataatgcaggtggaaggtctgtcctgccttctgcatcttttgggtgcacaaaaacataaaatcaggcactagagccctgagggaggttggtaagcatgcctggctcctcagccaagaaggaactgtagtgcgagtttcaccaagttctatcagccagacgcatctcgacacaagccctctctaaagccagacccacttacctaccactggctacactgccagttacctccggcaagagctgtacaaggcctccacctctcctctcttgctagaggcccgaaagctaatgaagagcaagtaatcataaaccaagggacaggcggctgcaggttccttgcctgggacttcttggcttctgttccaacactgatttctcaaactagcttgctcaaatgcttttacttccctgaaccagtatgcaatcatgggatttataggaggttcttaaaagtagctctaaaggacagacattttcctttccatttaaaaaactgagccgggtgcagtggctcacacctgtaatcccagctctttgggaggccgaggtgggtggatcacttgaggtcaggagttcgagaccagcatggccaacatggtgaaactccgtctctactaaaaatatgaaaattagccagccacggtggtgcatgcctgtaatcccagctactcgggaggctgaggcaggagaatcgcttgaacccgggaggtggaggttgcagtgagcagagatagatcatgccagtgcactccatcctgggtgacagagtatcaaaaaactgcttatcctttcatctaccagcctcaccaaatgctcttggcgtcaggtgattcactgcaacgttgacttaagggtgcttttaatgccaggtgcggtggttcatgcctgtaatcccaaatcccagcaccttgggaggccaaggcaggaagatcattgacatcaggagttggagacaagcctgaccaacatagtgcaaccccatctgtactaaaaatacaaaaattagccaagcacgtggggcctgcctgtaatcccagctactcgggaggctgagacaaggggatcacttgaatccaggacgtagaggttgcagtgagccaagatcgcacccctgcactccagcctgggtgacagagactatctcaaaataaaaaagagtgcctttaattattaaatcgaagcaaatgtctttaacaattaagaatatacttaaccgggctccttcttgtttgctgatggtaacctccggggattctctctctgtttcagagggccccccccacaggaaacttcgcagtgatgcaccaggtatcatgccttcagcttcgcagctgtgtgttgtctcagtatccatttcttttctgcccaatgcgcccctctgcccaccccaatttttaaacccttgcacatttccacgagattcttgcaaaatctggaggcttggatatctttgtgcaaagctttcattgaaaccaagatcaggatgacaaatagacctcatctcttgacccactgtccttcctgcctctgggcagcacatgtgacatgacacccaacagtgtgcgcccttatcactgcatcttgacgagatggcagaggctgtgtgtgtagcttggatttttcttcctttcataccaaaagccactcttacgtggttagggcactcagcagtgctgtcctcccttgtccagtgaagacactgcactgaatgaatatgacagttccactatctgggcacattcctggagaacgtacttggcttctagttggctggtctgggtcacaagtcagagatcacaaagttcacggtaactgcggcgcggcaaccagtcctcccatgattcagctttcacaggcttgtctgcgaaggaaatgagctcactgcgatgtctgacaaatgccgggggctgcacgtggcttgagtgatgtctagctacaaactgcattttcagcacacggggtggaagctgaccaccgcaaagccaagcacagtcctggcagagccttttctggaggcttcacgggcatgtacatgttcagggactggggagtggatacccaagactcaaggatgcacacagggcccttcccaagaaagcatgaagaggtctctgctgctctgggattttgcttttttttttttttttttttgagacggagtctcgctctggagtgcaatggcgcaatcttggctcaccgcaacctttgcctcctgggttcaagcgattctcctacctcagccttctgagtagctgggattacaggctcccgccacctcgcccagctaatttttgtatttttattagagacaggatatcaccatgttggccaggctggtctcaaactcctgacttcaggtgatccgcgcgccttggcctccccaaatgctgggattacaagcatgaccaacttttcacaggtgaagttaggccatgtggatctgacttcacctcatggagaggccaaaccaaccctcatttgtgtccatcttcatttttggagaatctcagctttgctgtcactaccaaaatacttaaagcgcagggtgaggtcttgttaagagccagttttgtgggggagcagatgagtttctaggacacttcaagcagctctcctaccagctgattgggatcataggataagccaaattccagggtgggctgaagtgcagaacccactggtcagtgggaaactgagtccttgcaaactagcaggtgcttacactcaagatgattcccgaggccttggataagctgagtccacgaatagaatccaaatgctaggccaggcacagtgggtcatgcctataatcccagcactttgggaggccgaggcgggcagataacttgaggtcaggaccagcctggccaacatggtaaaaccccgtctctcctaaaaatacaaaaattagccaggagtggtggcatgtctgtagtcccagttacttggaaggctgaggcaggagaatcgcttgaacctgggaggcagaggctgcagtgagccaagatcacgccactgcactccagcctgggcaacacagcgagactctatttcaaaaaaaaattccagattctccaggatcagaccctttaagaaaacctttaggggggtcccttagttcctgtaacaggtatagttggtgtcaaccttggtctaggatttgaaaccagttccaagaaaagcacttcagccaaaacagagtatcttgcaggctgacagccaagcaaggagcttcaacggcccagggcacaatgtatttcttaggtcaagggagcaaatttatccattaagcttttccagttagcaaatagactcttccaagagccaaaaagagagtgcctagagcactgatgtggaggttagggactacttcccagctcatcagatttttttttgtttttttttttggagacagtcttgctgtttcccaggctggagtgcagtggcacaacgttggctcactgcagccttcacctcctgggttcaagcaattctcctgcctcagcctcctgagtgactgggattccaggcgcctgccaccacgcacggctaatttagtatatttagtagagacggggtttcaccatattggccaggatggcctcgaacaactgacctcacgagtgatctgcccacctcggcctccccaagtgctgggattacaggcatgagtcgcagcaactggccaacccatcagggtttgaacctggagttaaaactgtgacgaagagagctgtgtggggagcgtacagggaacagtcaaactgctgctcctctgcgctgaatttgagcatccttctgagtcaagcgcttggaaaacagtgctaaaaaagaaaaagacttaagggtcacatctagagagagaaggatggagagttctctagtagggctgcaagtccagaagcttctctgtgaagctgggctaggagtgtttactttgaagtggctgcagctttaagtatttattcctgatcgctgcactgcgggaagtcccatcctttatagccaggtgggctttcccagccggggtctctcccatcctctgtcaacaaaagggtcatttgcgaattcctcttctcagtgatcatgaatctctgggccttgatttttttttttttttttttttgagacggagtctcaccctgtcgcctaggctggagtgcagtggccacatctcggctcactgcaagctccgcctcctgggttcatgtcattctcctgcctcagcctccctcccgagtagctgggactacaggcacccgccagcacgcccggctaattttttgtatttttagtagagacacggtttcaccatgttagccaggatggtctcgatctcctgacctcatgatccgcccgcctcagcctcccaaagtgctgagattacaggtgtgagccaccatgcccagccgagttgttccttttgactaaagaattggtcactgagttgtgttcatccttatggcttcttatccaacccttgcgtggggagcaaaagtctgctctcttctttgatgtcctaaaataagacctgtcttccgattcaggtcaaacagggccagatggccagagcccaacataattatttgttgcggttgctgaaaagagttaagtgtttcttctgaacggtgaaggctggcagcaggcagatctgatttttccttcttctgcccactctcttcctcctacccaaagtctcccctcacgtgaccagcccttcctgtgaagtcgaggtgataaactcaagagagaaccagcgcagagaggagatggcagcattaaggagagacaggggtgtcctactggctggagctaaaatccacctcagaggccaggtgcactggcacacacctgtaatcccaacactttgagaggctaagacaggtggatcgtttgaggccaggagttcaagaccagcctgggtcacatggcaaaatcccatctctgctaaaaatacaaaaattagccaggcgtggcagtgtgcacgtgcatgtagtcccagctactcaatactgaggctcaaggactgctggaactcaggaggcagaggttgcagtgagccaagatcatgccactgcactccagcctgggtgagagagactcttaaatttcttttttaaatccaccttgaaggccaggtgtggtggcccacgcctgtaatgccagcgctttgggaggccaaggtaggagaactgcttgagctcaggagttccagaccagcctgggcaacaatatcaagacctcatctcaatttaataaaataatccaccttggattaacacgtataatttccttttctaatattcactgggcacctgttttacgccatgtgcggtatgttccacgatcagcaaaacagatgcagcagtccctgcagtggggaaaactcagtccatgaacattcacaccagcagggggtgctgtctcgccttttaaccagggagcccctctgtgtccttctcaaggctgcccttgtccatttcaccttcttccaattcaaatcttgaaaactcacctctaaggcgaatgggggtgaggagatacagaagaaaaacagtatgttctctcttcaactctgccccatgggctatgaataaagtcagaagacaaaatcccctgcttggtttttggcgtttttttcctattctaaatcaaagaccacagcagaccagaatcctgtggcttctcaaatgaccaagcctgacatattgaaaagcagatcgtcttgctttgaaaaaccttctccacccacccccgcaaccaatttcagctgattaaattcaatcactcatgccttaagactggcaatgatttgttgacttcaacttgaatatctgcatcttatttgtgccgtgtgtgttttctgccataaaaaaaatttatattgcaataggactatagctacaagtttaaaatagatttataaaaaatctatcccaaccatgaagatttctttgctaaataatgtgttttcttacaacccacaggcgaggaaacgagacctctttcgttccttctagaaggtctggaggacgtagagttattgaaaatgcagatggttctgaggaggaaacggacactcgagacgcagacttcaatggaaccaaggccagtgaataagcaactttctacagttttgcaccacggcaagaaaaccaaaaaccaaaacaaacaaacaaaaaaaacccaacaacaacccagaacaaagcaaaacccagcagactgtacttagcattgtctaaatccattctcaaattccaaatatcacagacacccctcacacaaggaatataaaaaccaccaccctccagcctgggcaacgtagtaaaacctcatctatacaagaatttaaaaataagctgggcgtggtggtacacacctgtggtcccagctactagggaggctgagccaggaagaacgctccagcccaggacttcgaggctgcaatgagctataattgcatcattgcactccagcctgggcaacagagaccctgtctcaaccaccaccaccaccaccacccctactacccctgtattcaaggtaaaaattgaagtttgtatgatgtaagagatgagaaaaacccaacaggaaacacagacacatcctccagttctatcaatggattgtgcagacactgagtttttagaaaaacatatccacggtaaccggtccctggcaattctgtttacatgaaatggggagaaagtcaccgaaatgggtgccgccggcccccactcccaattcattccctaacctgcaaacctttccaacttctcacgtcaggcctttgagaattctttccccctctcctggtttccacacctcagacacgcacagttcaccaagtgccttctgtagtcacatgaattgaaaaggagacgctgctcccacggaggggagcaggaatgctgcactgtttacaccctgactgtgcttaaaaacactttcactaataaatggttataaatcacaatgtcgttggcttttctgttgagctgttttctatagaggaaaaggagttggggaaggctgggttttgcttcatcgtcccaaagattctctgaagtcagggttaacgtcatgaatgcagaaactgaggcctagagaggtgaaatcaattgcctacaaccccacagccagccagagagcagagcagagatgcaaagtgagactgtctaagggggttactgggccgctcagcagggagggcaggggagagaaataaggtgatgtgtggtctaagggccactgccccctgccctcgaacatgactgggaagaacatcttgactcatcaaaaccagtatcttaagaaaaatacaggatttccttgattttttgagttaaaacacaaggtcttgtccaatgagtcagcaaacactttccacaaaacgtcagatggtggctgggtacagtggctcacacctggaatcccagcactttgggaggctgagatgggaaaatcacttgaggccaggagttggaggccagcctagccgagagagacccccgtctctataaaaaaaaggtgttttttttttgttgttgttagtaagccaggcaggatagtgcacacctgtactcccaacctcttggaaggctaaggcaggaggatcatgtgagccaggagttccaggctgcagtgagctatgatcacgccactgcactgcagcctaggtaacagtaacaccttgtctctcacaccaccaccaccacccacccagccagatagtattttagcctttacaggctacatatggtcttgccgaatattcatcttctttaaaacaacccttaaaaacataataaatcattcttagagtaagggccataaaaacaagctgtaggccctgtccttctttcagcttgagtgttttagacagacatgcctgcaaaggctctgttcaacacaaacgatgccgtataccaccaactccatgggatcagacagatttgggagacaggaaacatggaaacaaaggactccatcttgtgaccagatgctaatatgccttgaatgacgcacaaacacatcccggatacatttctaaaaacctggcttgaatagaaattttcaaaaagattttttcatattttttaacttggttaaaaaaagtttttcaccactctgtgggaaaacattaaagtataaacatacaaagcctctttgaccagaagcccaacaagttcaacattcgtttctcttgattttattgatcttttaaaaaaataaaaggacatcttctgtggatacaggttaggatgtttctagggtaagaaacccaccatcgcagcgtaattctctgcggaatttcagtagcacttggaaagttctgttttcaacctgaaatttttgctgttcttccagaaaataacttagtaacaaaatgaaggccgtgaagctgcaggcacactccagaaattagtgtgttcttttaactcgtgtcccaaagagacagcagttcctaacatgcagtgatgagtggacacaccatggtgcgttggaaatcccacgttcacgtctttgacaaggaagcctcctacaatgatcttgtgctttaattttacttgatggtcaccctggttacttcattatgcctttgaatgaagtcctgttcttagtggctgcattaccaaggccatcttgccccaaagacccctcagggtcctgaggcagaattccccccaccccaccaggggactcaggaaaatgaatgatcgcagtttgccaaaagaggtcagatttcccactgacgctggttggtctggaaaattactctgaaaactcgaacgcacctctaggaatctcaatgagaagctaagaagcaggctacagtctcagaggtttatgacacctttttttttttttttggagacggagtctcactctgttgcccaggctggagtacagtagcgcgatcttggctcactgcaccctccacctcccgggtccaagcaactctcctgcctcaacatctggagtagctggaattataggcacgcaccactgcacccagctaattttttgtatttttagtagagatggggtttcaccatgttggccaggctggtcttgaactcctgacctcaggtaatccacccgcctcggccttccaaagtcttaggattaccggcctgagccaccgcgcccagcctattccagtttttaaaaaggcatgtgactgttaagttctctgttcttagacatgatttcagtacaccacaaagcactgggagattttgttctggaagacgattccacctggttgggagttggggggaagagcctctgagagaagctccatcccacatttacggagacttgggacattaaaaacacctgtcaagaccaatcaggggccaggcacggtggctcaggcctgtaattccagcactctgggaggctgaggcgggaggatcacttgaggccgggagttcaagaccagcatggccaacatggtgaaaccccgtttctcactaaaaatacaaaattagtgggtgtagtggcacactcctgtagtcccagctacttgggaagctgagataagagaatcgcttgaacctaggaggcggaggctgcggtgagccgaaattgcaccactacactccagcctggacaagacagggcaagagcatgactctgtctcaaaaaagaaaaaaaaaaaaaagaccaatcaggacctccgcttgggttagtgcaacacaatggggcatgggaacgatggctcatgcttgaaatcccagcattctgggaggccgagatgggaggatcacttgaggccaggagttcaagaccacactgggcaacatggcaaaaccccgtctctattaaaaatacaaaaaattcagccaggtgtggtggtgggtgcctgtaatcccagctacctggaagactcaggaacaagaaccgtttgaacccaggaggcggaggttgcagtgagctgagatcacgccaccacactccagcctgggtgacagagcaagactctatctcaaaaacaacacggtagcctcatcaccgacaacttagagcccttcccagagagccccttttgtccctctttgcaatgcacacggtggcaggtaaggatgaaaagacatttcccagggacaaaccccagagcacaggtgatggcctcggtcattggcttgggccgcaaagctaactaactatggtgactgctcttatttctcaaactaacttaaaacaaaaacctagtgtaaaaagacgacaaaaggtaacgacttccgcaccaacaccaagaccttcagcttccgtggttttcctaaagcaacatcttgactaccccctgggctgacggcagcggcgatgaagacatgtgtgaaggcggcttcccaaattccaggcgcttccccaaccttcagacagagcaaaccaaattaagctgacataacagctgtgacaaactggctagcaccggggcccagagagttataagggtgaacatcaagagtcaggagcagggtctcacagggtctcaattttctctcctgtgaaatgaagaagaggacactggctacctggctctcagattccaaggtcacacaaaacgcccagtctcagacccactagaaaaatccatctcttacctattgtttgtttgttttacagcctacgcaacatagtgagaccctgtctctatgaaaaatgcaaacaaaaattagctgggtgtggtggcctgcatgtgtagtcccagctacttggtaggctgaggtggaaggatcgctggagcccaggaggcggaggttgcagtgagccgagatcacaccaccgcagtctagcctgggtgacagagtgagaccctgtctccaaaaaaaaaaaaaggccaggcatgattgctaacgcttgtaacccccagcacttgggaggtcaaggtgggaagatcgcctggaaaattaatctgaaaactcacctctagaaatctcaatgagaagcagactacagtctcagaggtgtattctcaaactcaaagccaggaggtttgagaccagtctgggcaacatagcaagactgtttctataaaatataaaaaaaattagccaggggtggtggtgtgcacctgtagccccagctacttgggaggctgaggcaggaagatggcttgagcccaggaggacgaggctgcagtgagctatggtcgcaccactgcactccagcctgggtgacacagcaaaaccctgtctcgtagaaagaaaacaaacaaaaattaatttttttttttttcttgagaaagagtctcactctgttgcccagagtggagttcagtggtgcaatcttggctcactgcaacctccacttcctgggttcaagtgattcttgtgcctcagccacccaagcagctgggactacaggcatccgcgaccatgcccggctaattttcgtatttttagtatagatagggtttcaccatgttgcccagtttggtcttgtgaactcctggcctcaagtgatccacccacttctgcctcccaaagtgctgggattacaggtgtgagccacttcactgcacctggcctaaaaatccacgtgtaaaggtctcaaagttatgtgcatgccatggaaaatattcttaatttcctgtcacgtgtctgctacaaacccatcaaattcctacggcttggggcccagagagatggtagtcacacaccttgcagaattcctgaatctgaaagctgccccttttttttctgagacaaggtctcgcttcatcacccaggctggagtgcagtggctgggaacacggctcactgcggcctcaacctccagagctcaattgatccgctgccctcagcctcccaaagtgctgggattacaagtgtgagccactgagcctggccctgattttctttaggcaagaaaattaatgacactgttagagatcagatctgcactgtcccatcgggtggctggtttcaggaacatagtctgggctagaagttagtgccagtttctcaaaggttctacagatttaaaaagaaaaaaaagggctggttgcagtggctcacgcctgtaatcccagcactttgagagcccgaggtgggtggatcacaatgtcacgagatcaagaccatcctaacacagtgaaaccccgtctcgactaaaaatacaaaaaattagctgggcatggtggcacacgcctgtaatcccagctactcaggaggctgaggcaggagaattgcttggacttgggaggcagaggttgcagtgagctgagatcatgccactacactccagcctaggcgacagagcaagacgtctcaaaaaaaaaacaaaacaaaacaaaaaaaaaaacttcaggggaagcagagccatgactgatgctcaattccccaaataagggctttatttttatttaactaattaattaactttttgatatggagtcttgctctgtcacccaggctgctgtgcagaggcacaattttggctcactgcaatctctgcctccagggttcaagtgattctccttcctcagcctcctgagtagctgggactataggcacatgctaccatgcctggctcatttttctattttttttggtggagatggggttttaccaatgttgcccagactggttttgaactcctgacctcaagtgatccacctgccttggcctcccagactgctgggattacaggcgagcgtcaccacacctggcccaaataagggcttttatacaggacattctcacagtgtaaccgtgagtagcagctgtagaatcaaatgataaaaatgaccttcttggccaggcatggtagcccacacctgtcgtcgcagcactttgggaggatgaagggtgaggatcacttgaagctcagagtttgagaccaaactcggcaacatggcaaaacctgtctctagaaaaaatacaaaaaattagccgagcacggtgacacgcacctgtactcccagctactcgggggactgaggtgggaggatcgtttgagctgggaggcagagggtgagccatgatcctgccatcgtattctagcctaggtgacagagtgagaccctgtctcacaaaacaagaccctctctctagccctttgttcaagccacaagacaccacctaatgctgcctgcagggagcagaggagaggataaggtttgctgaaataatcctataatttaaaaagacacatggctgtgggctgggggtgagtgtctcttgcctggggcaggcgggttctccccgccagcgagaggtttattagaaggtactgaccccttatcacccaaaggcacgctggtgctgcttggccgtctctccccgccatctctgttcttgctgctccgcccagaggctgggccacctgttcggtttggggactgatcgtacacgaggttccggcaggaagcgagtttggactccagtgcctggacagaaatacacttttatctctcaagttataggcaaggactattctgtcttaccagagcctgtacagaagaacgaaccccagacagtggttctcaaactgttgtgcactggaattccaaggtgggaccccaagaggaatccaacgtatatgccagtctcagaaccaagcaccttaagtatttgggagctggctgggcacaatggctcacacctataatcccagcactctgggaggccaaggcaggaggatggcttgacatcaggagtttgagaccagcctgggccacaaagtaagatcccatctcagtttttttttttgttttgttttttacttttttagacgctgtgtcacccaggctggagtgcactggtgagatcacagctcactgcagcctcaacctcccaggctcaaccaatccctcccacctcagcctcctgagcagctggaattataggcatccgcaatcatgcccagttaataaaaaaaatttttaatgcaaaaaattttttttaattacgaaaaattttttaaaatgtttgggagctgcctggaaaaagatcacggctcactgcagcctcaaccaatccttccacctcagcctcctgaatagctaggactatgcacaatcatgcttggcttaaaaaaaaaaaaaaaattcttttttaattacaaaaaattttttaaaatgggagctttctggaaaaatcactaacctaccaattatccaactccgcttgtaggaagtaggaaatccacttctggaatccttcaccctttggtttaccttgttaaacctctgcagaatggcaagaagtttggtaaggacttggtctggctacaacagaccctgaggaaaccaaaaggacactgacagcaccccaggcttctctatactccaactaggctaaatactgaaatgcagacctgcttctagaatagcaaaccagacagccaaaaaccagaagtaaaaacaaaagaaatgagttgcaagcttctattaagttgtagctacaaatacactgtgtacagtgacaacttggtaggagttaaattatgtggccttctaggcatcatttttaaaaataaactacaaagaatacctatgtttttacttaagcacaaaaggatccctccctgtaattaacataaaagctgaaaggccaaattctttgccctaggctttcaagattttttttttttttttttttgagaccaagtctcactttgtcacccagcggtgcgatctcagctcactgcaacctccgcctcccggattcaaacaattttcctgcataagcctctcaagtagctgggatcgcaggtgcccaccaccattcctggctaatttttgtatttttagtagagatggggtttcaccatgttggccaggctggtcttgaattcctgacttcaggtgatccacccatctcggtctcccaaagtgtcaaaattcacttaaaccccaagaaacaaaccaaaaaaaaaaaaaaaaaaaaaaaaggtggcagtttttttctcttctgagacaacgtcgtgctgtcacccaggatggagtgcagtgttggaatctcagctcactcagcctcaacctcccaggctgaagcaatcctcccacctctcagcctcctgagtagctgggaccaccagtgtacaccatcaggcctggctaatttttgcattcttgtagaggccaagtcggggcagggggtttcaccatgttgcccgggctggtgtcagactcctgagctcaagtaatctcccaccttggcctcccaaagcactgggattacaggtatgagcacccggccaaaagagaaggcagtttccaagtgctccttaatttttcgagttaaggaaaaaacacacatatcaccctaatttcccaaatttcctagaggaaaaacggtaaaaggaaagagacatacatagggttcagagcagggcttcgagtcagagctctgagtgtctggcagtaactcccacaggaagctctaatgattcccagggatgctaaaggagcagccacacctaaaactcaccacactgctatgaaaggggctggacgcattggctcatgcctgtaatcccagaactttgggaggccaacctgggaggatcacttgaggccaggagtttaagaccagcctgggcaacacagcgatacccacattactacaaaaaaatgaaagtatcagccaggcatagtggcgcacacctgtggtccaagctcctcgggaagctaaggtgagaggatcgcttgaacccaggattttgaggctgcagtgagttgtgatcataccactacactccagcctgagcaacagagcaagaccctgtctctaaaaaaaaagaaaaaaagaagagagggaaggaactagatcaacccccttcacacatcctgaaagacaggcaggaaggcaccaaacgccaggaaagtgtggtcttaccccgactttccgcagtaggtctcccacaatgttgagggctgatatccgggccgcaggtgtgaggggggtccccccggtggagtcgtccaggcctgggtgtgcaaagggaagagcatgtaactcaccaacctatagtcatgtctgtgcgttaacatcgctagatccaaaaccacgggacaggagggacactgacgcctttcctcggatcccaaaagctaccctatttctttccgtagttaaccgcatcacacacccaaggcccgtatgacaaccaatttttcaagtccttgtgatgactgcaacaaatacttatttttacatgttagtcttgctctgtcacccggactggagtgcggtgatgtgatctcagctcactgcaacctccgcctcccaggttcaagcgattctcctgccttggcctcttgagtagctgggattatagccatgtgccaccacacccggctaatttttgtatttttagtagagacagagttccatcacgttgtccaggctggtctcgaactcttgacctcaaatgatctgcccgccttggcctccaaaagtgctgggattacgggcgtgagccaccatgcctggcctttaacaaattttttttttaatagagacagggtctcactatgttgcccaggctgatcatgaactcctagtttcaagcgatcctcccaccttggccgcccaaagggctggtatttacaggcatgagccaccgtgcccagccacattagtctttttaaacaaacccaaaacaaatccttttgaaattgtagaaaatccatatagttaattaacataatggcatctgtgatagatacaagaactatagacaggatgatccagctttacaagggtcccgctctgcagagcctctcttctccaagtggggtccatgcaccagcagcacatgagaactgttagaaatgcagaatctctcggccaggcacagtagctcacacctgtaatcccagtgctttcagaggccgaggcagttcgatcagttgaggtcaggagttcaagaccagcctggccaacatggcaaaatcttgtttctactaaaaatacaaaattagctgggcatggtaacaggtgcctgcctgtaatcccagctactcgggaggctgaggcatgagaatcgcttgaatccaggaggcagaggctgcagtgagccaagatcaatgccgctgcactccagcctggccgacagagcaagactttgtctcaaaaaaaaaaaaaaagagagaaagaaatttcaggccccacccaagacccacttgatctgaggtacattctaccaagatccccaggtaagctacatgcatattgaagtgtggaaacatagccaggcatggagttgcatgcctctagtcccagctactcaggaggctgaggcaggaggatcactggagcccaggagttggaggctgcagtgagctatgattgcaccactgcactccagcctgggccacagaccaagactgtgtctctaaaaacaacaatgaaataaagtatgcaaaatggctctagactggggctaggcacagtgactcatacatgtaataccaccactttcaggggctgaggcaggcagatcacctgaggtcagtagtttgagaccagcccggccaacatggtgaaaccccatctctactaaaaatacaagattagccaggcatggtggtgggcacctgtaattcaagcttactcaggaggctgaggcaggagaatcacttgaacctgggaggagggggttacagcgagccaatatcgcaccattgcactccagcctgggcaacagagcaaaactccatctcaacaaaactaaacagaagggctctgcaccggaattctagaagtctcactggtctcttcatgcccaggggacaagctaagggataaggtagtagatggtagggtaagccctggagcctgcctgcctgggtctgaatcccaaaccatctgccattcaattgcttcatgactctgcttaactcagagcctcactttcatcaaacggggacagcacctgcatcctgggcctgcggcgaaggctgcaggctggccagcacacactgagcactccttaactgtctgttattaatatctgctgtaaaaggcctgatcggaagctgtcagcagaggggctggggtgagaactgagattctttttttctgcccatgcagcacacgttacgctgagtctagctctcggtggatgtattactaaacccacagaacgctttttacttttttgtatttggtcagtgacatttcaaatttgggaggttttatattcaacaagaggatttttgaccaggcgcggtggctcacacctgtaatcccagcactttgggatcagccgaggtgggcggatcacttgagtccaggaatttgataccagcctgggcgacatggcaagactgtgtctccacctaaaatacaaaagttagccaggtgcctttagtcccagctactccggaggatgaggtgggagaatcacttgagcccacgatgaagaggttgcagtgagccaagatcacgtcactacactccagcctgggcaacagagtgagatcctgtctcaaaaaaaaaaacccaacaaaaaaaaagaggatttctggctttgaagaatggaaaaagctgcagatgaagggccaatcctcgtagctgcagagtggcagccacccgctctgggtggggtttccatttcatcagactccactactgcctcttacccagtcctcactgatctcaatgcccatccccaagaacatcccagtctactctctgctcaaagcctgagagcaaatcaggctctgagcctgatgcaaatcatcacacccccaggacccaccccagattcttacccagaaacactttgtgaaccgagaaaatcctgcaattcccactccccttaccacgtctgaagctcccaggtgtgtttaaacttgagctgggtcctcggtgagcaatgggcgtggacggcacggagcccgtggcctgcacagctgtgtctgtcctctcagcttccactgagctgggcatgggggtcctgggtttctcctgcttctgctgcacggccagttcctgccgcaaatctgtgccagaaaaaggattcaggaattcaagtcctcagccaggcgcagtggctcatgtttataatgccagcactttgggaggccaaggcaggtggatcgcctgaggtcaggagttcgagaccagcctgaccaacatggtgaaacctcatctctattgaaaatacaaaaattagcccagcatggtagtaggcacctgtaatctcagctactcaggaggatgaggcatgagaatcatttgaacctgggaggccagggtggcagtgagctgagattgctccagcgcactccagtctgggtgacaagagcaagactacgtctcaaaaaacaaaaagggaatttaagtccttgcttagggttggtggggtgcagggagagaggttcaacagtagataccagtcagaaaaaagacctactggggtgaaacactccaggtagaaaccccaaataaagggaaacccacaggaccttgcctagcagacttggaactctacaggatgtttctcttgactaacaaaatggtttcagatttttaaaaagctatgacagtgacacactaatgcttttattattgaaaaaacaattccaacatagcagtgtatttagaacactaaatgaaaatatgcccgggagcagtgactcatgcctgtaatcccagcactttgggaggctgaggtgtaagaatcacattaatccagtaagtcgaggctgcagtaagccatgatcataccacttcagcctgggcgagagtgagacctctggctcaaaaaaaaaaaaaaaaaaaaaaaaaaaagaaaaaaaaaaaaaaaggccagttgcactggctcaagcctataatcccagcactctgagaggtcgagatgggaggattgcttgaggtcaggaattttcaggccaacatggcaaaaccccgtctctattaaaaatacaaaaaattagccatgcgtggtggtgagcgcctgtagtcccagctgcttgggaggctgaggcaagacaatcgcttgagcctgggggacaagcagtgagtgcagtgagctgagatcacgccactgcactccagcctgtgtgacagagcaagactgtctcaaaaataaataaagtatgctttccagactatccccaaatgctcctcctcactcatcatcaccataacatgtgggagagcttttcaaccattgttctctgaatttttttttttttttttttttgagatggagtttcactctcttgcccgggcttaagtgcagtggcacagtctcggctcactgtaaatctgcctcccgggttcaagtgattctcctgcctcagcctcccaagtagctgggattacaggcacgcaccaccacacctggctaatttttgtatttttagtagacacagggtttcaccatgttgtccaggctggactctaactcctgacctcaggtgatccacccaccttggcctcccaaagtgctgggaatacaggcgtgagccactgcgcccagctgttctctccattttcaaacataaactttatacatatgtatgtatctactgagcataaaacaagaaaattttttattaagcattactggaaacatacaatatgttgtcctgtgtatgacttactctccccacttcagtggtatgtcttggcaatgatttttgttttagagacagggtctgactcagtcacccaggctggggtgcggtggcacaatcatagctcaatgtaaccttgaactcctgggctcaagtcatcctcccacttcagcctcctaagtagctggaactacagacatatgccaccaggcctaatttttacaattttcatttttgtagagatggggtatcactatgttgtccaggctcatcttgaactcctaggctcaagcaatcctcttgcgtccgtctctcaaagcactgagattacaggcatcagccactgtgcctagccttggcaatctttctaccacaacatttctatctactgttcattttaaccattaacatttcacaaaatacatctatgtacttcatttaaccacttcattactgatggacatctaggaacaactactttattaaacttaagaatttttactttttatcccccacctactggttacacattagaaagcaaatcgacgttataaataattaattgggccagcaacagtgacccacccctataatcccagcactttgggaggccgaggcaggcagatcgcctggggtcaggagttcaagaccagcctggccaacatggtgaaaccccatctctattaaaaatataaaaattagccaggcatggtggtgcacacctgcagtcccagctactcaggaggctgaagcaggggaatcgctgaacctgggaggcagaggttgcagtgagcagagatagcaccactgcactccagcctggacaacagagcaagacgccatctcaaaaaaaaaaaaaaaaaaaaaaaaaaaggtaaaaacaacttggacaatccactaatgaatgtcttttttttttttttttttttgagacaagagtctcactctgtcacccaggctggagtgcaatggtgtaattttggctcactacaacctccacctcccaggttcaagcaattctcgtgcctcagcctcctgagcagctgggattgcaggcacccaccaccataccctcatgttttctatttttagtagagatggggtttctctatgttgtccaggctggtctcaaactcctgagctcaggtgatccacctgcctcagcctcccaaagtgctgggattacaggtgtgaaccactgtgcctggccaaatgcctcattacagtttcaacattctacctctggaagtgccaactgaaaaagagcaaatgctgatgaggtttcaaagttttagccaaatatattggttgccatcaagtcacaaaaataataggctagctggcaattccaccagaaatttctccccacaacatctttgcttcttaagagacagggtctcactctgtcacccaggctggagtgcactggtgccatcatagctcactgcatactccacctcctgggctgaagcaatcatcccaccttggcttcctgagtagctgggactacaggcacatgccatcacacccagctaatctttaaatgtttttgtaaagatggagtcccactatgctgcccaggctggtctcaaactcctgggctcaagagatcctcggcctcccaaagtgctgggattacaggtgtgagccactgtgccagatctccccacaaaactctctgttcctactgagcatcagggtagtttgctgtgtttgtgaattacagaccaggaagcatctttctggaaataaattctgctgcccagaggcagaatcccaatacaaggacttcatctgtgaaccccaaagctatttctctaaatacccataaggggcccttacagggctggatgtctgactgttctcagctccagccagggcccaaggcaagagtctgcccagtgcagtccgacaccctctgattagacaacctgggtgcagagcagggtgtggggtccctgtaaagataatgctgggagagcttgtgggacaagatgttgctcaggtagggagaggggaccatgctggtgaagacaccaaggcctcctgacctctggcttcatccttcagtctctgaacagattccaggagattctctttttcatcaagttcactttccaggaaggcatttctttcgatggcctgattcaagcgctgctcaaagtcttcgagagacatgatcgtggcgctggcgaagagaaaagcagagttatccaagaggacaaaccgcagcatccctccagcaccgcggatccaggaggtgcgaagggtcagacacacctgggcacaagtcccagccccaaacttcctagatgccacagagtgggccaagtcccttaaccttctggggcatgggctctttacctgcagaatgggactcatcatagctcatggggtgcacgaggctgtcatgaggattaaataagatgctgcccacacagcactcagcaataagccaaagccctatcaggactgcatgtggcatttggtggtttgagaagaccactatgctccatcttctcttgcaagctcacaatgccaaccagcattaaaaataacctaatatgactgggcaaggtggctcatgcctgtaatcccagccctttgggaggccgaggcaggtggaagacctgagatcaggagttcaagaccagcctggcaagctt

SEQ ID NO: 456 - DNA, 1688 bp, Homo sapiens
gtgttaaagaaatcttactccaaggccttcacgctgaccatctctgccctctttgtgacacccaagacgactggggcccgggtggagttaagcgagcagcaactgcagttgtggccgagtgatgtggacaagctgtcacccactgacaacctgccgcgggggagccgcgcccacatcaccctcggctgtgcagctgacgtagaggccgtgcagacgggccttgacctcttagagattctgcggcaggagaaggggggcagccgaggcgaggaggtgggcgagctaagccggggcaagctctattccttgggcaatgggcgctggatgctgaccctggccaagaacatggaggtcagggccatcttcacggggtactacgggaaaggcaaacctgtgcccacgcaaggtagccggaaggggggcgccttgcagtcctgcaccatcatatgagtgttctcaccaccacttatgcccctagaagggaaggggagagggaaacgtgccctctgtttgatccttgttttgtgacatttttttttttttttttttttactcaaagttaacctacctgtaactttttaaaaacttgtaaaataactgaccctcccttcctgtccgccctcttcccctctaatgctcacgctcccaacacaaggtgggcagggaggcaccattcaggaacctggaccaaagctgacgaggctgggccaagccagggatggggccacagccagaaccccgagccctacttccaggttctggttagctcagccccagcccagcccagctgctctgcccagagctgggtgagtggggagacacctcagagccccgcaaaacccactgaccggaggcaaaaggcagtggggctgggggtagttttccatggtcacagagaactagtggtggctctgagaaggggaggacctctgggctttgattccatctccttgtcttttttctttgtttttagagacagggtcctgctatttcccaagctggagtgcagtggtgcgatcatggctcactgcagcctcgaactcctgggctcaagcaatcctcctgagtgatcccatttcttaatcagtgtagccccaagaaggctggggctatttaccagggtagaaaaaggagcttacctcccacctttggtcctaagtccctgccccctccccttcacaccataactaggtaacagtttgataactagggaagaaagcagaacagttaagcagccgccacatccccgctggctgggggcctcactccaggaaggggctggactggctgtcctttccagtggcctggctccgctgtgtggatggggccagaggcaggaaccctggtgaggaagctccagtcctgctctctacccagcccatcttgcctccatggtgcctctacctctgggcctcctctaacaggggctggtgggcaccaagagccaatggagtagacccctggctggtaagggccaagtcccaccggttgcttctgggaaggggtttctaacactagtctgtgtgctgtggttcctggggtgccctccactgccctctgttcagtaacagggccttgctaatcgggttgtcactcaacaaaagtgctttggatttaagttactatctggctttgcccaacctcagcaacctgtaagactgataatgaaataaatcatgttaatccta

SEQ ID NO: 457 - DNA, 3117 bp, Homo sapiens
ccgcggagtgcagcgaccgcgccgccgctgagggaggcgccccaccatgccgcgggccccggcgccgctgtacgcctgcctcctggggctctgcgcgctcctgccccggctcgcaggtctcaacatatgcactagtggaagtgccacctcatgtgaagaatgtctgctaatccacccaaaatgtgcctggtgctccaaagaggacttcggaagcccacggtccatcacctctcggtgtgatctgagggcaaaccttgtcaaaaatggctgtggaggtgagatagagagcccagccagcagcttccatgtcctgaggagcctgcccctcagcagcaagggttcgggctctgcaggctgggacgtcattcagatgacaccacaggagattgccgtgaacctccggcccggtgacaagaccaccttccagctacaggttcgccaggtggaggactatcctgtggacctgtactacctgatggacctctccctgtccatgaaggatgacttggacaatatccggagcctgggcaccaaactcgcggaggagatgaggaagctcaccagcaacttccggttgggatttgggtcttttgttgataaggacatctctcctttctcctacacggcaccgaggtaccagaccaatccgtgcattggttacaagttgtttccaaattgcgtcccctcctttgggttccgccatctgctgcctctcacagacagagtggacagcttcaatgaggaagttcggaaacagagggtgtcccggaaccgagatgcccctgaggggggctttgatgcagtactccaggcagccgtctgcaaggagaagattggctggcgaaaggatgcactgcatttgctggtgttcacaacagatgatgtgccccacatcgcattggatggaaaattgggaggcctggtgcagccacacgatggccagtgccacctgaacgaggccaacgagtacactgcatccaaccagatggactatccatcccttgccttgcttggagagaaattggcagagaacaacatcaacctcatctttgcagtgacaaaaaaccattatatgctgtacaagaattttacagccctgatacctggaacaacggtggagattttagatggagactccaaaaatattattcaactgattattaatgcatacaatagtatccggtctaaagtggagttgtcagtctgggatcagcctgaggatcttaatctcttctttactgctacctgccaagatggggtatcctatcctggtcagaggaagtgtgagggtctgaagattggggacacggcatcttttgaagtatcattggaggcccgaagctgtcccagcagacacacggagcatgtgtttgccctgcggccggtgggattccgggacagcctggaggtgggggtcacctacaactgcacgtgcggctgcagcgtggggctggaacccaacagcgccaggtgcaacgggagcgggacctatgtctgcggcctgtgtgagtgcagccccggctacctgggcaccaggtgcgagtgccaggatggggagaaccagagcgtgtaccagaacctgtgccgggaggcagagggcaagccactgtgcagcgggcgtggggactgcagctgcaaccagtgctcctgcttcgagagcgagtttggcaagatctatgggcctttctgtgagtgcgacaacttctcctgtgccaggaacaagggagtcctctgctcaggccatggcgagtgtcactgcggggaatgcaagtgccatgcaggttacatcggggacaactgtaactgctcgacagacatcagcacatgccggggcagagatggccagatctgcagcgagcgtgggcactgtctctgtgggcagtgccaatgcacggagccgggggcctttggggagatgtgtgagaagtgccccacctgcccggatgcatgcagcaccaagagagattgcgtcgagtgcccgctgctccactctgggaaacctgacaaccagacctgccacagcctatgcagggatgaggtgatcacatgggtggacaccatcgtgaaagatgaccaggaggctgtgctatgtttctacaaaaccgccaaggactgcgtcatgatgttcacctatgtggagctccccagtgggaagtccaacctgaccgtcctcagggagccagagtgtggaaacacccccaacgccatgaccatcctcctggctgtggtcggtagcatcctccttgttgggcttgcactcctggctatctggaagctgcttgtcaccatccacgaccggagggagtttgcaaagtttcagagcgagcgatccagggcccgctatgaaatggcttcaaatccattatacagaaagcctatctccacgcacactgtggacttcaccttcaacaagttcaacaaatcctacaatggcactgtggactgatgtttccttctccgaggggctggagcggggatctgatgaaaaggtcagactgaaacgccttgcacggctgctcggcttgatcacagctccctaggtaggcaccacagagaagaccttctagtgagcctgggccaggagcccacagtgcctgtacaggaaggtgcctggccatgtcacctggctgctaggccagagccatgccaggctgcgtccctccgagcttgggataaagcaaggggaccttggcgctctcagctttccctgccacatccagcttgttgtcccaatgaaatactgagatgctgggctgtctctcccttccaggaatgctgggcccccagcctggccagacaagaagactgtcaggaagggtcggagtctgtaaaaccagcatacagtttggcttttttcacattgatcatttttatatgaaataaaaagatcctgcatttatggtgtagttctgagtcctgagacttttctgcgtgatggctatgccttgcacacaggtgttggtgatggggctgttgagatgcctgttgaaggtacatcgtttgcaaatgtcagtttcctctcctgtccgtgtttgtttagtacttttataatgaaaagaaacaagattgtttgggattggaagtaaagattaaaaccaaaagaatttgtgtttgtca

SEQ ID NO: 458 - DNA, 2576 bp, Homo sapiens
gaattccgcagagatccagcaggtgctgcaccatgagtgtctctgtgctgagccccagcagactcctgggtgatgtctctggaatcctccaagcggcctccctgctcattctgcttctgctgctgatcaaggcagttcagctctacctgcacaggcagtggctgctcaaagccctccagcagttcccgtgccctccctcccactggctcttcgggcacatccaggagctccaacaggaccaggagctacaacggattcagaaatgggtggagacattcccaagtgcctgtcctcattggctatggggaggcaaagttcgtgtccagctctatgaccctgactatatgaaggtgattctggggagatcagacccgaaatcccatggttcctacagattcctggctccatggattgggtacggcttgctcctgttgaatgggcagacatggttccagcatcgacggatgctgaccccagccttccactatgacatcctgaagccctatgtggggctcatggcagactctgtacgagtgatgctggacaaatgggaagagctccttggccaggattcccctctggaggtctttcagcacgtctccttgatgaccctggacaccatcatgaagtgtgccttcagccatcagggcagcatccaggtggacaggaattctcagtcctacatacaggccattagtgacctgaacaacctggttttttcccgtgtgaggaatgcctttcaccagaatgacaccatctacagcctgacctctgctggccgctggacacaccgcgcctgccagctggcccatcagcacacagaccaagtgatccaactgaggaaggctcaactacagaaggagggggagctggagaagatcaagaggaagaggcatttggattttctggatatcctcctcttggccaaaatggagaatgggagcatcttgtcagacaaggacctccgtgctgaggtggacacgttcatgtttgagggccacgacaccacagccagtgggatctcctggatcctctatgctctggccacacaccccaagcatcaggagaggtgccgggaggagatccacagcctcctgggtgatggagcctccatcacctggaaccacctggaccagatgccctacaccaccatgtgcattaaggaggcactgaggctctacccaccggtgccaggcattggcagagagctcagcactcccgtcaccttccctgatgggcgctccttgcccaaaggtatcatggtcctcctctccatttatggccttcaccacaacccaaaagtgtggcccaacccagaggtgtttgaccctttccgttttgcaccgggttctgctcaacacagccacgctttcctgcccttctcaggaggatcaaggaactgcattgggaaacaatttgccatgaacgagctgaaggtggccacggccctgaccctgctccgctttgagctgctgcctgatcccaccaggatccccatccccattgcacgacttgtgttgaaatccaaaaatggaatccacctgcgtctcaggaggctccctaacccttgtgaagacaaggaccagctttgagggcctccacctgccgtcctgtcttcctgacccccgcttctgtccccttcctgtctgcccatatcctgttttctgtctgcccaccttcccttcttcccacctgcctgctgtcccccagtctgcctgcccttctctctctcacctttctccaggctccctacctgcttgtctacctgtctcctacccacctgtatctcttgttgggagaaaagctgagtgttgggagaagctgaggccgagcttgcatgtctgacataatgtaaaagagtcttgaatcatgtccaggatccagggtctaaaaccccttgtggcctttggaacaccaagctctgtgctgaagggtggaaggctaccctgacgcaccataatctaagcccggggcataaaacccctcgtggcttggatagaatccagggctcgtggctctggaatgtgtctggacttgctggctccttgctccttgctctcccaggatcaattgtatcttgagttaaaagaacctgctctccattatctcaagtaacagagcagatgctaaaccgtcacagctgtaaattgtgtgcttaatgcaacatgccctttcgacccaccccccattctcaccacctgtttctttgtttgatcaccaataaataatctgcacttccagagctcggggccttcacagcctccatccttagctttggcgccctggacccactttctctctcaaactgtcttttctcactgctttgactctgccggactttgtcacccccacgacctggtgttgggtctgaacaccccaacatccctgaatctccacccacctcccaaactcctgcctgccctccagactgtctgcccatacacctgtctccttcttcctgcctggcttgtctgttcctatattagtttcctattactgctgtaataaactatcacaatctcagtgattttaaataaaaaaaaaaaaaaaaaaaaaaaaaaaaaaaaacggaattc

SEQ ID NO: 459 - DNA, 4646 bp, Homo sapiens
cctactctattcagatattctccagattcctaaagattagagatcatttctcattctcctaggagtactcacttcaggaagcaaccagataaaagagaggtgcaacggaagccagaacattcctcctggaaattcaacctgtttcgcagtttctcgaggaatcagcattcagtcaatccgggccgggagcagtcatctgtggtgaggctgattggctgggcaggaacagcgccggggcgtgggctgagcacagcgcttcgctctctttgccacaggaagcctgagctcattcgagtagcggctcttccaagctcaaagaagcagaggccgctgttcgtttcctttaggtctttccactaaagtcggagtatcttcttccaagatttcacgtcttggtggccgttccaaggagcgcgaggtcgggatggatcttgaaggggaccgcaatggaggagcaaagaagaagaacttttttaaactgaacaataaaagtgaaaaagataagaaggaaaagaaaccaactgtcagtgtattttcaatgtttcgctattcaaattggcttgacaagttgtatatggtggtgggaactttggctgccatcatccatggggctggacttcctctcatgatgctggtgtttggagaaatgacagatatctttgcaaatgcaggaaatttagaagatctgatgtcaaacatcactaatagaagtgatatcaatgatacagggttcttcatgaatctggaggaagacatgaccaggtatgcctattattacagtggaattggtgctggggtgctggttgctgcttacattcaggtttcattttggtgcctggcagctggaagacaaatacacaaaattagaaaacagttttttcatgctataatgcgacaggagataggctggtttgatgtgcacgatgttggggagcttaacacccgacttacagatgatgtctctaagattaatgaagttattggtgacaaaattggaatgttctttcagtcaatggcaacatttttcactgggtttatagtaggatttacacgtggttggaagctaacccttgtgattttggccatcagtcctgttcttggactgtcagctgctgtctgggcaaagatactatcttcatttactgataaagaactcttagcgtatgcaaaagctggagcagtagctgaagaggtcttggcagcaattagaactgtgattgcatttggaggacaaaagaaagaacttgaaaggtacaacaaaaatttagaagaagctaaaagaattgggataaagaaagctattacagccaatatttctataggtgctgctttcctgctgatctatgcatcttatgctctggccttctggtatgggaccaccttggtcctctcaggggaatattctattggacaagtactcactgtattcttttctgtattaattggggcttttagtgttggacaggcatctccaagcattgaagcatttgcaaatgcaagaggagcagcttatgaaatcttcaagataattgataataagccaagtattgacagctattcgaagagtgggcacaaaccagataatattaagggaaatttggaattcagaaatgttcacttcagttacccatctcgaaaagaagttaagatcttgaagggcctgaacctgaaggtgcagagtgggcagacggtggccctggttggaaacagtggctgtgggaagagcacaacagtccagctgatgcagaggctctatgaccccacagaggggatggtcagtgttgatggacaggatattaggaccataaatgtaaggtttctacgggaaatcattggtgtggtgagtcaggaacctgtattgtttgccaccacgatagctgaaaacattcgctatggccgtgaaaatgtcaccatggatgagattgagaaagctgtcaaggaagccaatgcctatgactttatcatgaaactgcctcataaatttgacaccctggttggagagagaggggcccagttgagtggtgggcagaagcagaggatcgccattgcacgtgccctggttcgcaaccccaagatcctcctgctggatgaggccacgtcagccttggacacagaaagcgaagcagtggttcaggtggctctggataaggccagaaaaggtcggaccaccattgtgatagctcatcgtttgtctacagttcgtaatgctgacgtcatcgctggtttcgatgatggagtcattgtggagaaaggaaatcatgatgaactcatgaaagagaaaggcatttacttcaaacttgtcacaatgcagacagcaggaaatgaagttgaattagaaaatgcagctgatgaatccaaaagtgaaattgatgccttggaaatgtcttcaaatgattcaagatccagtctaataagaaaaagatcaactcgtaggagtgtccgtggatcacaagcccaagacagaaagcttagtaccaaagaggctctggatgaaagtatacctccagtttccttttggaggattatgaagctaaatttaactgaatggccttattttgttgttggtgtattttgtgccattataaatggaggcctgcaaccagcatttgcaataatattttcaaagattataggggtttttacaagaattgatgatcctgaaacaaaacgacagaatagtaacttgttttcactattgtttctagcccttggaattatttcttttattacatttttccttcagggtttcacatttggcaaagctggagagatcctcaccaagcggctccgatacatggttttccgatccatgctcagacaggatgtgagttggtttgatgaccctaaaaacaccactggagcattgactaccaggctcgccaatgatgctgctcaagttaaaggggctataggttccaggcttgctgtaattacccagaatatagcaaatcttgggacaggaataattatatccttcatctatggttggcaactaacactgttactcttagcaattgtacccatcattgcaatagcaggagttgttgaaatgaaaatgttgtctggacaagcactgaaagataagaaagaactagaaggtgctgggaagatcgctactgaagcaatagaaaacttccgaaccgttgtttctttgactcaggagcagaagtttgaacatatgtatgctcagagtttgcaggtaccatacagaaactctttgaggaaagcacacatctttggaattacattttccttcacccaggcaatgatgtatttttcctatgctggatgtttccggtttggagcctacttggtggcacataaactcatgagctttgaggatgttctgttagtattttcagctgttgtctttggtgccatggccgtggggcaagtcagttcatttgctcctgactatgccaaagccaaaatatcagcagcccacatcatcatgatcattgaaaaaacccctttgattgacagctacagcacggaaggcctaatgccgaacacattggaaggaaatgtcacatttggtgaagttgtattcaactatcccacccgaccggacatcccagtgcttcagggactgagcctggaggtgaagaagggccagacgctggctctggtgggcagcagtggctgtgggaagagcacagtggtccagctcctggagcggttctacgaccccttggcagggaaagtgctgcttgatggcaaagaaataaagcgactgaatgttcagtggctccgagcacacctgggcatcgtgtcccaggagcccatcctgtttgactgcagcattgctgagaacattgcctatggagacaacagccgggtggtgtcacaggaagagatcgtgagggcagcaaaggaggccaacatacatgccttcatcgagtcactgcctaataaatatagcactaaagtaggagacaaaggaactcagctctctggtggccagaaacaacgcattgccatagctcgtgcccttgttagacagcctcatattttgcttttggatgaagccacgtcagctctggatacagaaagtgaaaaggttgtccaagaagccctggacaaagccagagaaggccgcacctgcattgtgattgctcaccgcctgtccaccatccagaatgcagacttaatagtggtgtttcagaatggcagagtcaaggagcatggcacgcatcagcagctgctggcacagaaaggcatctatttttcaatggtcagtgtccaggctggaacaaagcgccagtgaactctgactgtatgagatgttaaatactttttaatatttgtttagatatgacatttattcaaagttaaaagcaaacacttacagaattatgaagaggtatctgtttaacatttcctcagtcaagttcagagtcttcagagacttcgtaattaaaggaacagagtgagagacatcatcaagtggagagaaatcatagtttaaactgcattataaattttataacagaattaaagtagattttaaaagataaaatgtgtaattttgtttatattttcccatttggactgtaactgactgccttgctaaaagattatagaagtagcaaaaagtattgaaatgtttgcataaagtgtctataataaaactaaactttcatgtg

SEQ ID NO: 460 - DNA, 1236 bp, Homo sapiens; identical to SEQ ID NO: 137

SEQ ID NO: 461 - DNA, 4268 bp, Homo sapiens
cccaaggaccactcttctgcgtttggagttgctccccacaaccccgggctcgtcgctttctccatcccgacccacgcggggcgcggggacaacacaggtcgcggaggagcgttgccattcaagtgactgcagcagcagcggcagcgcctcggttcctgagcccaccgcaggctgaaggcattgcgcgtagtccatgcccgtagaggaagtgtgcagatgggattaacgtccacatggagatatggaagaggaccggggattggtaccgtaaccatggtcagctggggtcgtttcatctgcctggtcgtggtcaccatggcaaccttgtccctggcccggccctccttcagtttagttgaggataccacattagagccagaagagccaccaaccaaataccaaatctctcaaccagaagtgtacgtggctgcgccaggggagtcgctagaggtgcgctgcctgttgaaagatgccgccgtgatcagttggactaaggatggggtgcacttggggcccaacaataggacagtgcttattggggagtacttgcagataaagggcgccacgcctagagactccggcctctatgcttgtactgccagtaggactgtagacagtgaaacttggtacttcatggtgaatgtcacagatgccatctcatccggagatgatgaggatgacaccgatggtgcggaagattttgtcagtgagaacagtaacaacaagagagcaccatactggaccaacacagaaaagatggaaaagcggctccatgctgtgcctgcggccaacactgtcaagtttcgctgcccagccggggggaacccaatgccaaccatgcggtggctgaaaaacgggaaggagtttaagcaggagcatcgcattggaggctacaaggtacgaaaccagcactggagcctcattatggaaagtgtggtcccatctgacaagggaaattatacctgtgtggtggagaatgaatacgggtccatcaatcacacgtaccacctggatgttgtggagcgatcgcctcaccggcccatcctccaagccggactgccggcaaatgcctccacagtggtcggaggagacgtagagtttgtctgcaaggtttacagtgatgcccagccccacatccagtggatcaagcacgtggaaaagaacggcagtaaatacgggcccgacgggctgccctacctcaaggttctcaaggccgccggtgttaacaccacggacaaagagattgaggttctctatattcggaatgtaacttttgaggacgctggggaatatacgtgcttggcgggtaattctattgggatatcctttcactctgcatggttgacagttctgccagcgcctggaagagaaaaggagattacagcttccccagactacctggagatagccatttactgcataggggtcttcttaatcgcctgtatggtggtaacagtcatcctgtgccgaatgaagaacacgaccaagaagccagacttcagcagccagccggctgtgcacaagctgaccaaacgtatccccctgcggagacaggtaacagtttcggctgagtccagctcctccatgaactccaacaccccgctggtgaggataacaacacgcctctcttcaacggcagacacccccatgctggcaggggtctccgagtatgaacttccagaggacccaaaatgggagtttccaagagataagctgacactgggcaagcccctgggagaaggttgctttgggcaagtggtcatggcggaagcagtgggaattgacaaagacaagcccaaggaggcggtcaccgtggccgtgaagatgttgaaagatgatgccacagagaaagacctttctgatctggtgtcagagatggagatgatgaagatgattgggaaacacaagaatatcataaatcttcttggagcctgcacacaggatgggcctctctatgtcatagttgagtatgcctctaaaggcaacctccgagaatacctccgagcccggaggccacccgggatggagtactcctatgacattaaccgtgttcctgaggagcagatgaccttcaaggacttggtgtcatgcacctaccagctggccagaggcatggagtacttggcttcccaaaaatgtattcatcgagatttagcagccagaaatgttttggtaacagaaaacaatgtgatgaaaatagcagactttggactcgccagagatatcaacaatatagactattacaaaaagaccaccaatgggcggcttccagtcaagtggatggctccagaagccctgtttgatagagtatacactcatcagagtgatgtctggtccttcggggtgttaatgtgggagatcttcactttagggggctcgccctacccagggattcccgtggaggaactttttaagctgctgaaggaaggacacagaatggataagccagccaactgcaccaacgaactgtacatgatgatgagggactgttggcatgcagtgccctcccagagaccaacgttcaagcagttggtagaagacttggatcgaattctcactctcacaaccaatgaggaatacttggacctcagccaacctctcgaacagtattcacctagttaccctgacacaagaagttcttgttcttcaggagatgattctgttttttctccagaccccatgccttacgaaccatgccttcctcagtatccacacataaacggcagtgttaaaacatgaatgactgtgtctgcctgtccccaaacaggacagcactgggaacctagctacactgagcagggagaccatgcctcccagagcttgttgtctccacttgtatatatggatcagaggagtaaataattggaaaagtaatcagcatatgtgtaaagatttatacagttgaaaacttgtaatcttccccaggaggagaagaaggtttctggagcagtggactgccacaagccaccatgtaacccctctcacctgccgtgcgttctggctgtggaccagtaggactcaaggtggacgtgcgttctgccttccttgttaattttgtaataattggagaagatttatgtcagcacacacttacagagcacaaatgcagtatataggtgctggatgtatgtaaatatattcaaattatgtataaatatatattatatatttacaaggagttattttttgtattgattttaaatggatgtcccaatgcacctagaaaattggtctctctttttttaatagctatttgctaaatgctgttcttacacataatttcttaattttcaccgagcagaggtggaaaaatacttttgctttcagggaaaatggtataacgttaatttattaataaattggtaatatacaaaacaattaatcatttatagttttttttgtaatttaagtggcatttctatgcaggcagcacagcagactagttaatctattgcttggacttaactagttatcagatcctttgaaaagagaatatttacaatatatgactaatttggggaaaatgaagttttgatttatttgtgtttaaatgctgctgtcagacgattgttcttagacctcctaaatgccccatattaaaagaactcattcataggaaggtgtttcattttggtgtgcaaccctgtcattacgtcaacgcaacgtctaactggacttcccaagataaatggtaccagcgtcctcttaaaagatgccttaatccattccttgaggacagaccttagttgaaatgatagcagaatgtgcttctctctggcagctggccttctgcttctgagttgcacattaatcagattagcctgattctcttcagtgaattttgataatggcttccagactctttgcgttggagacgcctgttaggatcttcaagtcccatcatagaaaattgaaacacagagttgttctgctgatagttttggggatacgtccatctttttaagggattgctttcatctaattctggcaggacctcaccaaaagatccagcctcatacctacatcagacaaaatatcgccgttgttccttctgtactaaagtattgtgttttgctttggaaacacccactcactttgcaatagccgtgcaagatgaatgcagattacactgatcttatgtgttacaaaattggagaaagtatttaataaaacctgttaatttttatactgacaataaaaatgtttctacagatattaatgttaacaagacaaaataaatgtcacgcaacttaaaaaaaaaaaaaaaa

SEQ ID NO: 462 - DNA, 7695 bp, Homo sapiens
gcaacgaaggtaccatggccgttgtcgtcgccgccgcggctcccggggctggatggggggccgaggccagccagtggcacccggaagaaagagacgcggcggcggcgacgccgacaccctcaggacgagtgtccggacttgcccacagcctcaaggaggagacggcgaggcccggcccccgctgtccctggtgtaaagaagtcgccgtagccgtcgcggccgggactccccgggctctcgcccttcaggtttcgttgacactcaggaccgtacgtacgctgcgccatgttcaagaaactgaagcaaaagatcagcgaggagcagcagcagctccagcaggcgctggctcctgctcaggcgtcctccaattcttcaacaccaacaagaatgaggagcaggacatcttcatttacagagcaacttgatgaaggtacacccaatagagagtcaggtgacacacagtcttttgcacagaagctccagctccgggtgccctccgtggagtctttgtttcgaagtccgataaaggaatctctattccggtcttcttctaaagagtctttggtacgaacatcttccagagaatccctgaatcgacttgacctggacagttctactgccagttttgatccaccctctgatatggatagcgaggctgaagacttggtagggaattcagacagtctcaacaaagaacagttgattcagcggttgcgaagaatggaacgaagcttaagtagctacaggggaaaatattctgagcttgttacagcttatcagatgcttcagagagagaagaaaaagctacaaggtatattaagtcagagtcaggataaatcacttcggagaatagcagaattaagagaggagctccaaatggaccagcaggcaaagaaacatctgcaagaggagtttgatgcatctttagaggagaaagatcagtatatcagtgttctccaaactcaggtttctctactgaaacaacgattacgaaatggcccgatgaatgttgatgtactgaaaccacttcctcagctggaaccacaggctgaagtcttcactaaagaagagaatccagaaagtgatggagagccagtagtggaagatggaacttctgtaaaaacactggaaacactccagcaaagagtgaagcgtcaagagaacctacttaagcgttgtaaggaaacaattcagtcacataaggaacaatgtacactattaactagtgaaaaagaagctctgcaagaacaactggatgaaagacttcaagaactagaaaagataaaggaccttcatatggccgagaagactaaacttatcactcagttgcgtgatgcaaagaacttaattgaacagcttgaacaagataagggaatggtaatcgcagagacaaaacgtcagatgcatgaaaccctggaaatgaaagaagaagaaattgctcaactccgtagtcgcatcaaacagatgactacccagggagaggaattacgggaacagaaagaaaagtccgaaagagctgcttttgaggaacttgaaaaagctttgagtacagcccaaaaaacagaggaagcacggagaaaactgaaggcagaaatggatgaacaaataaaaactatcgaaaaaacaagtgaggaggaacgcatcagtcttcaacaggaattaagtcgggtgaaacaggaggttgttgatgtaatgaaaaaatcctcagaagaacaaattgctaagctacagaagcttcatgaaaaggagctggccagaaaagagcaggaactgaccaagaagcttcagacccgagaaagggaatttcaggaacaaatgaaagtagctcttgaaaagagtcaatcagaatatttgaagatcagccaagaaaaagaacagcaagaatctttggccctagaagagttagagttgcagaaaaaagcaatcctcacagaaagtgaaaataaacttcgggaccttcagcaagaagcagagacttacagaactagaattcttgaattggaaagttctttggaaaaaagcttacaagaaaacaaaaatcagtcaaaagatttggctgttcatctggaagctgaaaaaaataagcacaataaggagattacagtcatggttgaaaaacacaagacagaattggaaagccttaagcatcagcaggatgccctttggactgaaaaactccaagtcttaaagcaacaatatcagactgaaatggaaaaacttagggaaaagtgtgaacaagaaaaagaaacattgttgaaagacaaagagattatcttccaggcccacatagaagaaatgaatgaaaagactttagaaaagcttgatgtgaagcaaacagaactagaatcattatcttctgaactgtcagaagtattaaaagcccgtcacaaactagaagaggaactttctgttctgaaagatcaaacagataaaatgaagcaggaattagaggccaagatggatgaacagaaaaatcatcaccagcagcaagttgacagtatcattaaagaacacgaggtatctatccagaggactgagaaggcattaaaagatcaaattaatcaacttgagcttctcttgaaggaaagggacaagcatttgaaagagcatcaggctcatgtagaaaatttagaggcagatattaaaaggtctgaaggggaactccagcaggcatctgctaagctggacgtttttcagtcttaccagagtgccacacatgagcagacaaaagcatatgaggaacagttggcccaattgcagcagaagttgttggatttggaaacagaaagaattcttcttaccaaacaggttgctgaagttgaagcacaaaagaaagatgtttgtactgagttagatgctcacaaaatccaggtgcaggacttaatgcagcaacttgaaaaacaaaatagtgaaatggagcaaaaagtaaaatctttaacccaagtctatgagtccaaacttgaagatggtaacaaagaacaggaacagacaaagcaaatcttggtggaaaaggaaaatatgattttacaaatgagagaaggacagaagaaagaaattgagatactcacacagaaattgtcagccaaggaggacagtattcatattttgaatgaggaatatgaaaccaaatttaaaaaccaagaaaaaaagatggaaaaagttaagcagaaagcaaaggagatgcaagaaacgttaaagaaaaaattactggatcaggaagccaaacttaagaaagagcttgaaaatactgctctagagcttagtcagaaagaaaaacagtttaatgccaaaatgctggaaatggcacaggctaactcagctggaatcagtgatgcagtgtcaagactggaaacaaaccaaaaagaacaaatagaaagtcttactgaggttcatcgacgagaactcaatgatgtcatatcaatctgggaaaagaaacttaatcagcaagctgaagaacttcaggaaatacatgaaatccaattacaggaaaaagaacaagaggtagcagaactgaaacaaaagatcctcctatttgggtgtgaaaaagaagagatgaacaaggaaataacatggctgaaggaagaaggtgttaagcaggatacaacattaaatgaattacaggaacagttaaagcagaagtctgcccatgtgaattctcttgcacaagatgaaactaaactgaaagctcatcttgaaaagctagaggttgacttgaataagtctctgaaggaaaatacttttcttcaagagcagctagttgaactgaagatgctggcagaagaagataagcggaaggtttctgagttgactagcaagttgaaaaccacagatgaagaattccagagtttgaaatcttcacatgaaaaaagtaacaaaagcctagaggacaagagcttggaatttaaaaaactgtctgaggaactagcgattcagctagatatttgctgtaagaaaaccgaagccttattagaagctaaaacaaatgagctaatcaacattagtagtagtaaaactaatgccattctttctaggatttctcattgtcagcaccgtacaactaaagttaaggaggcactgttaattaaaacttgcacagtttctgaattagaagcacaacttagacagttgacagaggagcaaaatacactaaatatttcttttcaacaggctactcatcagttagaagaaaaagaaaatcaaattaagagcatgaaggctgatattgaaagtcttgtaacagaaaaagaagccttacagaaggaaggaggcaatcagcaacaggctgcttctgaaaaggagtcttgtataacacagttgaagaaagagttatctgaaaacatcaatgctgtcacattgatgaaagaagagcttaaagaaaaaaaagttgagattagcagtcttagtaaacaactaactgatttgaatgttcagcttcaaaatagcatcagcctatccgaaaaagaagcagccatttcatcactaagaaagcagtatgatgaagaaaaatgtgaattgctggatcaggtgcaagatttatcttttaaagttgacactctgagtaaagagaaaatttctgctcttgagcaggtagatgactggtccaataaattctcagaatggaagaagaaagcacagtcaagatttacacagcatcaaaacactgttaaagaattgcagatccagcttgagttaaaatcaaaggaagcttatgaaaaggatgagcagataaatttattgaaggaagagcttgatcagcaaaataaaagatttgattgtttaaagggtgaaatggaagacgacaagagcaagatggagaaaaaggagtctaatttagaaacagagttaaagtctcaaacagcaagaattatggaattagaggaccatattacccagaaaactattgaaatagagtccttaaatgaagttcttaaaaattacaatcaacaaaaggatattgaacacaaagaattggttcagaaacttcaacattttcaagagttaggagaagaaaaggacaacagggttaaagaagctgaagaaaaaatcttaacacttgaaaaccaagtttattccatgaaagctgaacttgaaactaagaagaaagaattagaacatgtgaatttaagtgtgaaaagcaaagaggaggagttaaaggcattggaagataggcttgagtcagaaagtgctgcaaaattagcagagttgaagagaaaagctgaacaaaaaattgctgccattaagaagcagttgttatctcaaatggaagagaaagaagaacagtataaaaaaggtacagaaagccatttgagtgagctaaatacaaaattgcaggaaagagaaagggaagttcacatcttggaagaaaaacttaagtcagtggaaagttcacagtcagaaacattaattgtacccagatcagcaaaaaatgtggcagcatatactgaacaagaagaagcagattcccaaggctgtgtgcagaagacatatgaagaaaaaatcagtgttttacaaagaaacttaactgaaaaagaaaagctattgcagagggtagggcaggaaaaagaagagacagtttcttctcattttgaaatgcgatgccaataccaggagcgcttaataaagctagaacatgctgaggcaaagcaacatgaagatcaaagtatgataggtcatcttcaagaggagcttgaagaaaaaaacaagaaatattccttgatagtagcccagcatgtggaaaaagaaggaggtaaaaataacatacaggcaaagcaaaacttggaaaatgtgtttgacgacgtccagaaaaccctccaggagaaggaactaacctgtcagattttggagcaaaagataaaagagctggattcctgcttagtaagacagaaagaagtacatagagttgaaatggaagagttgacctcaaaatatgaaaaattacaggctttacaacagatggatggaagaaataaacccacagaacttttggaagaaaacactgaagaaaagtccaaatcacatttggtccaacccaaattgcttagtaacatggaagcccagcacaatgatctggagtttaaattagccggggcagaacgggagaaacagaaactgggcaaggagattgttagattgcagaaagaccttcgaatgttgagaaaggagcatcagcaagaattggaaatactaaagaaagaatatgatcaagaaagggaagagaaaatcaaacaggagcaggaagatcttgaactgaagcacaattccacattaaaacagctgatgagggagtttaatacacagctggcacaaaaggaacaagagctggaaatgaccataaaagaaactatcaataaggcccaggaggtggaggctgaacttttagaaagccatcaagaagagacaaatcagttacttaaaaaaattgctgagaaagatgatgatctaaaacgaacagccaaaagatatgaagaaatccttgatgctcgtgaagaagaaatgactgcaaaagtaagggacctgcagactcaacttgaggagctgcagaagaaataccagcaaaagctagagcaggaggagaaccctggcaatgataatgtaacaattatggagctacagacacagctagcacagaagacgactttaatcagtgattcgaaattgaaagagcaagagttcagagaacagattcacaatttagaagaccgtttgaagaaatatgaaaagaatgtatatgcaacaactgtggggacaccttacaaaggtggcaatttgtaccatacggatgtctcactctttggagaacctaccgaatttgagtatttgcgaaaagtgctttttgagtatatgatgggtcgtgagactaagaccatggcaaaagttataaccaccgtactgaagttccctgatgatcagactcagaaaattttggaaagagaagatgctcggctgatgtttacttcacctcgcagtggtatcttctgagtaaaccatcagtctgtgcttagttaacatgtgtcatggctccgatcttcatcttgaagaagagtgacattgggtgactgctgcttggaaaactgtccacacttgctactctttgagaatgaagttgtcattcagggcccctcatgtagccaaaagaccaagaaaaatctggcccacagataagttgcagactgcctttaaaatagattttatcagtggagaaatggtgatagttttttcttcagttttctcttgggaaggagttttatgttgtttaaaagatattttgataacttaacctgctttatgggcttacataatattcctttcatccattctttttaaagaacggcttacctttcctatttatttttagggtgattttttaaaaagacttgtgcaatacattttgaggtgaaacttagtggattttttctgataaattagagcatttaattgactattttattcaggttgatctgttgaatatttgctaaagaccagttctttaagctaagacatgtaaaaaatcccaaatggcagtacctcattgtttacttagcttttgtacttatatttttcagaggaaaaaacactactgtaaattgtgaatagccaatacataactgtattgtatgcaaatctgtgattgttggcagtgtcatctctgagaaacagataaataaagtttatttactataaaaaaaaaaaaaaaag

SEQ ID NO: 463 - DNA, 3223 bp, Homo sapiens
cgagtttgaggcagcgctagcggtgaatcggggccctcaccatgagttcctcgcctgttaatgtaaaaaagctgaaggtgtcggagctgaaagaggagctcaagaagcgacgcctttctgacaagggtctcaaggccgagctcatggagcgactccaggctgcgctggacgacgaggaggccgggggccgccccgccatggagcccgggaacggcagcctagacctgggcggggattccgctgggcgctcgggagcaggcctcgagcaggaggccgcggccggcggcgatgaagaggaggaagaagaggaagaggaggaggaaggaatctccgctctggacggcgaccagatggagctaggagaggagaacggggccgcgggggcggccgactcgggcccgatggaggaggaggaggccgcctcggaagacgagaacggcgacgatcagggtttccaggaaggggaagatgagctcggggacgaagaggaaggcgcgggcgacgagaacgggcacggggagcagcagcctcaaccgccggcgacgcagcagcaacagccccaacagcagcgcggggccgccaaggaggccgcggggaagagcagcggccccacctcgctgttcgcggtgacggtggcgccgcccggggcgaggcagggccagcagcaggcgggaggggacggcaaaacagaacagaaaggcggagataaaaagaggggtgttaaaagaccacgagaagatcatggccgtggatattttgagtacattgaagagaacaagtatagcagagccaaatctcctcagccacctgttgaagaagaagatgaacacttcgatgacacagtggtttgtcttgatacttataattgtgatctacattttaaaatatcaagagatcgtctcagtgcttcttcccttacaatggagagttttgcttttctttgggctggaggaagagcatcctatggtgtgtcaaaaggcaaagtgtgttttgagatgaaggttacagagaagatcccagtaaggcatttatatacaaaagatattgacatacatgaagttcgtattggctggtcactaactacaagtggaatgttacttggtgaagaagaattttcttatgggtattctctaaaaggaataaaaacatgcaactgtgagactgaagattatggagaaaagtttgatgaaaatgatgtgattacatgttttgctaactttgaaagtgatgaagtagaactctcgtatgctaagaatggacaagatcttggcgttgccttcaaaatcagtaaggaagttcttgctggacggccactgttcccgcatgttctctgccacaactgtgcagttgaatttaattttggtcagaaggaaaagccatattttccaatacctgaagagtatactttcatccagaacgtccccttagaggatcgagttagaggaccaaaggggcctgaagagaagaaagattgtgaagttgtgatgatgattggcttgccaggagctggaaaaactacctgggttactaaacatgcagcagaaaatccagggaaatataacattcttggcacaaatactattatggataagatgatggtggcaggttttaagaagcaaatggcagatactggaaaactgaacacactgttgcagagagccccccagtgtcttgggaaatttattgagattgctgcccgaaagaagcgaaattttattctggatcagacaaatgtgtctgctgctgcccagaggagaaaaatgtgcctgtttgcaggcttccagcgaaaagctgttgtagtttgcccaaaagatgaagactataagcaaagaacacagaagaaagcagaagtagaggggaaagacctaccagaacatgcggtcctcaaaatgaaaggaaactttaccctcccagaggtagctgagtgctttgatgaaataacctatgttgaacttcagaaggaagaagcccaaaaactcttggagcaatataaggaagaaagcaaaaaggctcttccaccagaaaagaaacagaacactggctcaaagaaaagcaataaaaataagagtggcaagaaccagtttaacagaggtggtggccatagaggacgtggaggactcaatatgcgtggtggaaatttcagaggaggagcccctgggaatcgtggcggatataataggaggggcaacatgccacagagaggtggtggcggtggaggaagtggtggaatcggctatccataccctcgtgcccctgtttttcctggccgtggtagttactcaaacagagggaactacaacagaggtggaatgcccaacagagggaactacaaccagaacttcagaggacgaggaaacaatcgtggctacaaaaatcaatctcagggctacaaccagtggcagcagggtcaattctggggtcagaagccatggagtcagcattatcaccaaggatattattgaatacccaaataaaacgaactgatacatatttctccaaaaccttcacaagaagtcgactgttttctttagtaggctaactttttaaacattccacaagaggaagtgcctgcgggttccttttttagaagctttgtgggttgattttttttcttttcttttttgtacatttttaattgcagtttaaaagtgaatcgtaagagaacctcagcattgtgcacgataagagaatgtgtcagtatttcagggttctacatttatctgtaaaatgtgacttttttttttttttatcacaacagaagtaaaatgttgctttgtacctggtgtcttttattaagaatttactccccccatttctcacagagaataacagtcgggagtcattgtcacaatataatagaaatgttagcaaccagattcatgtaaggactaagtggtcctcatgaattgcattaagactctgtactgctcatattacactccatcctctctgtagtttgctgggtagtggagggggtaagctaaatcatagtttctgacaataactgggaaggttttttcttaaaataacaatggaattggtataattgggattgaaaactaaaacttggaactaagatagagaagatggagtgtatgtagaagggctgttaaaaatgtaaaacttggttgcattatttgtggaggctcaaacttgtgaaggttaataccataatttttccatttgttctgcattttgattctgaaaagaaagctggctttgc

SEQ ID NO: 464 - DNA, 3653 bp, Homo sapiens
attgcaacacatgcagctgcctggagagagggagccggtgtcctacgtcagagccgccgccgccgcgagccgccgccggggaggagcagccgctgccgcccaggactgggcccttagggaggaggaggcgagaagatggcggacgaccccagtgctgccgacaggaacgtggagatctggaagatcaagaagctcattaagagcttggaggcggcccgcggcaatggcaccagcatgatatcattgatcattcctcccaaagaccagatttcacgagtggcaaaaatgttagcggatgagtttggaactgcatctaacattaagtcacgagtaaaccgcctttcagtcctgggagccattacatctgtacaacaaagactcaaactttataacaaagtacctccaaatggtctggttgtatactgtggaacaattgtaacagaagaaggaaaggaaaagaaagtcaacattgactttgaacctttcaaaccaattaatacgtcattgtatttgtgtgacaacaaattccatacagaggctcttacagcactactttcagatgatagcaagtttggattcattgtaatagatggtagtggtgcactttttggcacactccaaggaaacacaagagaagtcctgcacaaattcactgtggatctcccaaagaaacacggtagaggaggtcagtcagccttgcgttttgcccgtttaagaatggaaaagcgacataactatgttcggaaagtagcagagactgctgtgcagctgtttatttctggggacaaagtgaatgtggctggtctagttttagctggatccgctgactttaaaactgaactaagtcaatctgatatgtttgatcagaggttacaatcaaaagttttaaaattagttgatatatcctatggtggtgaaaatggattcaaccaagctattgagttatctactgaagtcctctccaacgtgaaattcattcaagagaagaaattaataggacgatactttgatgaaatcagccaggacacgggcaagtactgttttggcgttgaagatacactaaaggctttggaaatgggagctgtagaaattctaatagtctatgaaaatctggatataatgagatatgttcttcattgccaaggcacagaagaggagaaaattctctatctaactccagagcaagaaaaggataaatctcatttcacagacaaagagaccggacaggaacatgagcttatcgagagcatgcccctgttggaatggtttgctaacaactataaaaaatttggagctacgttggaaattgtcacagataaatcacaagaagggtctcagtttgtgaaaggatttggtggaattggaggtatcttgcggtaccgagtagatttccagggaatggaataccaaggaggagacgatgaattttttgaccttgatgactactaggtagtcgacatgggtccggcaaaacgtgcctcaccctccagcatccaacccaaggagcatacccatggtggaatccaaacagatccctgccttacaattggaacatttccagaacttaatccatgagcattggatattgaaaagaaaaccgaaacaaaaccagacccagccctacactttggtttgtcatggtgtcagcgcagcagcctacaactaagttcctaaacgccactttggactaatttaaaaaagaatcccagtttttacttttactggatggtgaaattggttgctcttgtattttatgaaaaaaaatgatttttttaaccttcatacatagaagcaaaaatactttaactgctgtaaaccttcaaaagttaatagaagtgagatcatactggtttgtttcttattttgattggagaaaaattaaattgctgcatttcgcagtgacccatttacatggcattctcagcttagactgcgtaagaagaaatatatgtggtgaaatgttggaaccatttctctcttggtctctgtttaatgttgaaagggtgagctaataggaggcactttcaacttcactccctcacgctaccccgtccccctccagactggcagtttcaaggatgcaaattgcattgcaaaatcaaactgactcatgaagcatttgggccagtgcactgtttacttccatctgtttgcagacacatttgtgcccggcgtttgggagccctttgtatcaatgttctgacaagggtccctataaccttaacctactcgaaaccggtttgggatggatatgatggggcttctgtgctattgctgggattgggagaaataaaacatgcaatttaagtggaagcgaagaaatttaaagaggattttattttgcttgggtcaatccttgttaaaagggaggtggatgtgtttccttgtgttggatggcatgagattatgtgaatgttttgatttattaaaatgaactgcaaggtttttcacaggaacgacagacatgtatgactgcatgtaattataaactcctgacctcctggtggggttggagcatctgtttcaaatgtgggacttacaagcacttctcacatgagaaattaggggcgggtgggaagggatgggacacagcttctggcaccatggatttaagaccatgttggatccaaaagttggcctgaaaccctgaagctgatgcttcacagctgggctgtaagtcagacttgaacccagctgatatgcaaggtcatggcgtgccagggtggtgacagttgaacaaagtgtatagtacgtgcccagtggtagcgatggaaaaaagtataccaaatggactttgaaggaccaaaggttttaaaagtcaattggtatcacctccacactgactagggtagtggggtgcatttggttttcaaattgggtacttttaacactttagtgcctgactgctgttctttactgacttgattcagtcactcgtagctttattggtctgaaccagctccttgttcccaggttacagacctgcctatcgttccaataatcctgtttcacttgaatgaagggagtatgtcttaaatgtaaagtttctggttctcacactgtactctgaggtccaaatactgtctgtcaatgtgtaacctgatgtctcaaccccctgtgagaagagtccattatttggtgttcaccaacgtgggagacttcaccggaacaggcttttttgctttgggctctgctatttgtttgcagaacacccaagagcgagcaaacacgctctcttcacagcagtaccttagggttttgccattgtaaatgggtctgatgtgatatgacaagaccagagaaattggatgtaaatttacatttttgaatatgcttgttgtttcacatgatacatttagggtatgcagctccttttgtagtttttatttttactatttaagtttggaaatgatgccaaatttttgtatttctttaatcaatgtgttctcttcggtgatatatattgcattatatattgatgtgtgtatcaatatatattgatatgtattacacttacacatacaaacacatataagagggggtgaaaaccgtagcctttgcattctctatagcctctgcagagagatactaagcagcaaaatcttggtgttgtgatgtacagaaatggagaagagtattaaaccatatttaag

SEQ ID NO: 465 - DNA, 2301 bp, Homo sapiens
ttttgcagagcagtcattatggcgaaccttggctgctggatgctggttctctttgtggccacatggagtgacctgggcctctgcaagaagcgcccgaagcctggaggatggaacactgggggcagccgatacccggggcagggcagccctggaggcaaccgctacccacctcagggcggtggtggctgggggcagcctcatggtggtggctgggggcagcctcatggtggtggctgggggcagccccatggtggtggctggggtcaaggaggtggcacccacagtcagtggaacaagccgagtaagccaaaaaccaacatgaagcacatggctggtgctgcagcagctggggcagtggtggggggccttggcggctacatgctgggaagtgccatgagcaggcccatcatacatttcggcagtgactatgaggaccgctactatcgtgaaaacatgcaccgttaccccaaccaagtgtactacaggcccatggatgagtacagcaaccagaacaactttgtgcacgactgcgtcaatatcacaatcaagcagcacacggtcaccacaaccaccaagggggagaacttcaccgagaccgacgttaagatgatggagcgcgtggttgagcagatgtgtatcacccagtacgagagggaatctcaggcctattaccagagaggatcgagcatggtcctcttctcctctccacctgtgatcctcctgatctctttcctcatcttcctgatagtgggatgaggaaggtcttcctgttttcaccatctttctaatctttttccagcttgagggaggcggtatccacctgcagcccttttagtggtggtgtctcactctttcttctctctttgtcccggataggctaatcaatacccttggcactgatgggcactggaaaacatagagtagacctgagatgctggtcaagccccctttgattgagttcatcatgagccgttgctaatgccaggccagtaaaagtataacagcaaataaccattggttgtctgaaatacctttgcctggatacctctggctccttcagcagctagagctcagtatactaatgccctatcttagtagagatttcatagctatttagagatattttccattttaagaaaacccgacaacatttctgccaggtttgttaggaggccacatgatacttattcaaaaaaatcctagagattcttagctcttgggatgcaggctcagccgctggagcatgagctctgtgtgtaccgagaactggggtgatgttttacttttcacagtatgggctacacagcagctgttcaacaagagtaaatattgtcacaacactgaacctctggctagaggacatattcacagtgaacataactgtaacatatatgaaaggcttctgggacttgaaatcaaatgtttgggaatggtgcccttggaggcaacctcccattttagatgtttaaaggaccctatatgtggcattcctttctttaaactataggtaattaaggcagctgaaaagtaaattgccttctagacactgaaggcaaatctcctttgtccatttacctggaaaccagaatgattttgacatacaggagagctgcagttgtgaaagcaccatcatcatagaggatgatgtaattaaaaaatggtcagtgtgcaaagaaaagaactgcttgcatttctttatttctgtctcataattgtcaaaaaccagaattaggtcaagttcatagtttctgtaattggcttttgaatcaaagaatagggagacaatctaaaaaatatcttaggttggagatgacagaaatatgattgatttgaagtggaaaaagaaattctgttaatgttaattaaagtaaaattattccctgaattgtttgatattgtcacctagcagatatgtattacttttctgcaatgttattattggcttgcactttgtgagtattctatgtaaaaatatatatgtatataaaatatatattgcataggacagacttaggagttttgtttagagcagttaacatctgaagtgtctaatgcattaacttttgtaaggtactgaatacttaatatgtgggaaacccttttgcgtggtccttaggcttacaatgtgcactgaatcgtttcatgtaagaatccaaagtggacaccattaacaggtctttgaaatatgcatgtactttatattttctatatttgtaactttgcatgttcttgttttgttatataaaaaaattgtaaatgtttaatatctgactgaaattaaacgagcgaagatgagcacca

SEQ ID NO: 466 - DNA, 1763 bp, Homo sapiens; identical to SEQ ID NO: 138

SEQ ID NO: 467 - DNA, 4494 bp, Homo sapiens
gccggatgagttgcttttaggcttgctggcccgcggggctgtccaggcacgcgaggcccctcaggtacgccctctcttccctgcaggatccggccctcaaagacgagggtcacgcacgcgttacaaccccgaaacagtagcacaagatttaatttttaaaagagcgtgtttcttcggggcttgccgttcgttcgtttccagcctcaggaatttatggtcgcctttttgaatgagcaacaaaatgcttcaacaagttccagaaaacataaattttcctgctgaagaagagaaaatcttggagttttggactgaatttaattgttttcaggaatgcttaaagcaatcaaaacataaaccaaaatttaccttctatgatggtcctccttttgcaactggactgcctcactatggacatatacttgcgggtacaattaaagatatagttacaagatatgctcaccagagtgggtttcatgttgacagaagatttggatgggattgccatggcttacctgtggaatatgaaattgataagacactgggaatcagaggaccagaggatgtggccaaaatggggattacagagtataacaatcagtgccgagcaattgtgatgagatattctgctgagtggaagtctactgttagcagacttggccgatggattgactttgacaatgactataaaactctgtatccacaattcatggaatcagtctggtgggtcttcaaacaactctatgataaaggccttgtttatagaggtgtgaaagtcatgcccttctctacggcatgtaacactccactttccaacttcgagtcacaccagaattataaggatgttcaagatccttcagtatttgtaactttccctttggaagaagatgaaactgtatctttagttgcttggacaaccactccctggactctacctagtaaccttgctgtgtgtgttaatccagaaatgcaatatgtgaaaattaaagatgttgccagaggacgattactcattttaatggaagccagattgtcagccctctataaattggagagtgactatgagatccttgaaagatttcctggtgcctatcttaaaggcaagaagtacaggcccctgtttgactatttcctgaagtgtaaagagaatggcgctttcactgtgcttgttgacaactatgtgaaggaagaagaaggcacaggggttgtccaccaagctccttacttcggtgctgaggactatcgggtctgtatggactttaacattattcggaaagactcactccctgtttgccctgtggatgcttcaggctgcttcacaacggaggtgacagatttcgcaggacagtatgtgaaggatgctgacaaaagtatcatcaggactttgaaggaacaaggccgacttctggttgccaccaccttcactcacagctaccctttttgctggagatcagacactcctctaatttacaaagcagtgcccagctggtttgtgcgagtggagaacatggtggaccagctcctaaggaacaatgacctgtgctactgggtcccagagttggtacgagaaaaacgatttggaaattggctgaaagatgcacgtgactggacaatttccagaaacagatactggggcacccccatcccactgtgggtcagcgatgactttgaggaggtggtatgcattgggtcagtggcggaacttgaagaactgtcaggagcaaagatctcagatctccacagagagagtgttgaccacctgaccattccttcacgctgtgggaagggatccttgcaccgcatctctgaagtgtttgactgttggtttgagagtggcagcatgccctatgctcaggttcattacccgtttgaaaacaagagggagtttgaggatgcttttcctgcagatttcattgccgagggcatcgaccaaaccagaggatggttttataccctgctggtgctggccacggccctctttggacaaccgcctttcaagaacgtaattgtgaatgggcttgtcctggcaagtgatggccaaaaaatgagcaaacggaaaaagaattatccagatccagtttccatcatccagaagtatggtgctgatgccctcagattatatctgattaactcccctgtggtgagagcagaaaacctccgctttaaagaagagggtgtgcgggacgtccttaaggatgtactgctcccatggtacaatgcctatcgcttcttaatccagaacgttctgaggctccagaaggaggaagaaatagaatttctctacaatgagaacacggttagagaaagccccaacattacagaccggtggatcctgtccttcatgcagtctctcattggcttctttgagactgaaatggcagcttataggctttatactgtggtgcctcgcctggtcaagtttgtagatattctgaccaattggtatgttagaatgaaccgcagaagattaaagggtgaaaatgggatggaggattgtgtcatggccctagaaaccttgtttagtgttctgctttctctttgcagacttatggctccctacacaccttttctcactgaattgatgtaccagaatctaaaggtgctgattgaccctgtttctgttcaggacaaggacacactcagcattcactacctcatgctgccccgtgttcgagaagaattgattgacaagaaaacagagagtgcagtatctcagatgcagtctgtgattgaacttggaagagtgatcagagaccgaaaaactattcccataaagtatcctttgaaagaaattgtggttatccatcaagatccagaagctcttaaagatatcaagtctttggagaagtatatcattgaggaactcaatgttcgaaaagttacactgtctacagataaaaacaagtatggcattcggctaagggcagaaccagatcacatggtcctggggaagcgtctgaagggagcctttaaggcagtgatgacgtccatcaagcagttgagcagtgaggagctggagcagttccagaagactgggaccattgttgtggaaggccatgaattgcacgatgaagacatccgcctcatgtacacctttgatcaggccacaggtgggactgcgcaatttgaagcacactcagatgctcaggctttggtcctcttagatgtcactcctgaccagtcaatggtagatgaaggaatggctcgggaagtcatcaatcgcatacagaaacttcgcaaaaagtgcaatctggttccaactgatgaaatcacagtgtactataaagcaaagtctgaaggaacatatctgaatagtgttattgaaagccacacagagttcatatttaccaccataaaggctcccttgaaaccatatccagtttctccatcggataaagtccttattcaagaaaaaacacagttgaagggatctgaactggaaattacactcaccagaggatcttcccttcctggtcctgcttgtgcatatgtcaatcttaacatttgtgcaaatggcagtgaacaaggtggagtattgctcctggaaaatccaaaaggtgacaataggttggaccttttaaagctgaagagtgttgtcactagcatttttggtgtgaaaaatacagagctggctgtcttccatgatgaaacagaaatacaaaaccaaactgacttactgagtcttagtggaaaaacactttgtgtgactgcaggatcggctccctctctgatcaacagttctagtactcttctttgtcagtatatcaacctacagctcctgaatgcaaagccacaagagtgtttaatggggacagtgggcactctcctgcttgaaaacccacttgggcagaatggactcacccaccaaggtcttctgtatgaagcagccaaggtgtttggccttcggagcaggaagctaaagctgtttctgaatgagacccaaacgcaggaaattacagaagacatccccgtgaagactttgaatatgaagactgtgtatgtttctgtgttaccaacaacagcagacttctagcatgtacttatcaatgttgttcggtcagcccttccctaattacacctatcccctacacatacatgcacatagacacacacatgaacacactgaagatatttccttcaggtgtgtgtaaaatatgctgcttggattgaaattcaaatgggattgattagtcaagtaacttgagacctcacagtaatcttcacacttaaccttagacacctatgcagtcatgttgggagcaggttacaatgttacttcagcccacagtttatttctatacttgagttcttaagtacagaagatagaagtgatttaaatggcatagtatatatatcattttctggccttttaaaatttatttgagacctcttgatgaaatggacatattatatatttctgccacctggattttcctggataatttgatggaatattttaagtttcagtaaatcagaacaataaacaaactcagatat

SEQ ID NO: 468 - DNA, 3687 bp, Homo sapiens; identical to SEQ ID NO: 139

SEQ ID NO: 469 - DNA, 2591 bp, Homo sapiens
gcacgagggaaaaagaaaaacagttacaggaattaaaactcaaggtttctgatttgtcagacacgagatgcaagttagaggttgaacttgcgttgaaggaagcagaaactgatgaaataaaaattttgctggaagaaagcagagcccagcagaaggagaccttgaaatctcttcttgaacaagagacagaaaatttgagaacagaaattagtaaactcaaccaaaagattcaggataataatgaaaattatcaggtgggcttagcagagctaagaactttaatgacaattgaaaaagatcagtgtatttccgagttaattagtagacatgaagaagaatctaatatacttaaagctgaattaaacaaagtaacatctttgcataaccaagcatttgaaatagaaaaaaacctaaaagaacaaataattgaactgcagagtaaattggattcagaattgagtgctcttgaaagacaaaaagatgaaaaaattacccaacaagaagagaaatacgaagctattatccagaaccttgagaaagacagacaaaaattggtcagcagccaggagcaagacagagaacagttaattcagaagcttaattgtgaaaaagatgaagctattcagactgccctaaaagaatttaaattggagagagaagttgttgagaaagagttattagaaaaagttaaacatcttgagaatcaaatagcaaaaagtcctgccattgactctaccagaggagattcttcaagcttagttgctgaacttcaagaaaagcttcaggaagaaaaagctaagtttctagaacaacttgaagagcaagaaaaaagaaagaatgaagaaatgcaaaatgttcgaacatctttgattgcggaacaacagaccaattttaacactgttttaacaagagagaaaatgagaaaagaaaacataataaatgatcttagtgataagttgaaaagtacaatgcagcaacaagaacgggataaagatttgatagagtcactttctgaagatcgagctcgtttgcttgaggaaaagaaaaagcttgaagaagaagtcagtaagttgcgtagtagcagttttgttccttcaccatatgtagctacagccccagaactttatggagcttgtgcacctgaactcccaggtgaatcagatagatccgctgtggaaacagcagatgaaggaagagtggattcagcaatggagacaagcatgatgtctgtacaagaaaatattcatatgttgtctgaagaaaaacagcggataatgctgttagaacgaacattgcaattgaaagaagaagaaaataaacggttaaatcaaagactgatgtctcagagcatgtcttcagtatcttcaaggcattctgaaaagatagctattagagattttcaggtgggagatttggtactcatcatcctagacgaacgccatgacaattatgtgttatttactgttagtctactttatattttctacattcagagtctctacctgccctggatctcaaaccaggtgagggtgcttcaggtgcatctagaagaccctgggtacttggaaaagtaatggaaaaagaatactgtcaagccaaaaaggcacaaaacagatttaaagttcctttggggacaaagttttacagagtgaaagccgtatcatggaataagaaagtataacttatggacaaaattaatacattctatgacatttttttctgatttgtcctgcagtgctcattcatcactccaaaaacagcaggccatctttttatgcaaaagtcagcgtgacaatatacttcactggtgtacatcgtttactttttaactggcttcattttaggaataataaattcatcagaatccttggctgaattaaaatggtttttgttttttggttttttttttttacccagacaactctagaaatgcggaccaaactacttcattttctcaaagggcataccttgtgcattgtggcttatgatgagccatattaattgcctgttaaatatacactagcttgaacttagatgttaaaatgttattattaccagcatttgtccttttgtgaaatcagtatcagaatacttgcactctttaacacattctttataaaatgtataaattattcagaactatttaaaataaagaggagtgttattgcatgctgataatcattttgagtttgcctcagtagatactaaagcaaattgtttcagtttttttaaatgccctttgatgtttcaaaaaaaaaaaggaactgtaatttgattgactgattttagctagccataagtaactagcaatcttcaaaagcactttcagatggattggtcatctgggttctaaagggaagagtctgtgctactaaccatttcaaatgcagactcaaaccttcccaacatctttatgactctagaataatcatattgatgaaatcgtaattcatggttgagtttcagaacaaaagatattcattgcacattaaccatttagaggtcatttaaataacaaatattgtattgtaaaagaactgtacaattttaaaacaataaagatttaacctgtaaaaaaaaaaaaaaaaaaa

SEQ ID NO: 470 - DNA, 468 bp, Homo sapiens
  misc_feature (1)...(468): n=a,t,g or c
atggtncayytnacnccngtggagaagtcygcygtnacngcnctntggggyaaggtnaaygtggatgaagyyggyggygaggccctgggcagnctgctngtggtctacccttggacccagaggttcttngantcnttyggggatctgnnnacnccngangcagttatgggcaaccctaaggtgaaggctcatggcaagaaagtgctcggtgcctttagtgatggcctggctcacctggacaacctcaagggcacctttgccacactgagtgagctgcactgtgacaagctncaygtggatcctgagaacttcaggctnctnggcaacgtgytngtctgygtgctggcccatcactttggcaaagaattcaccccaccagtgcangcngcctatcagaaagtggtngctggtgtngctaatgccctggcccacaagtatcactaagctngcyttyttgytgtccaattt

SEQ ID NO: 471 - DNA, 3610 bp, Homo sapiens
cctgcctgcccgcctgcttgctctctggctgtgctcctgcttaaagaaatcagtccttcctttccgacttagtcctcgggaagaagtttcagactacaaggtatcattggaacatttcaagatcatcaaatcaaattccacagggattggtgaccaaccagaaggctcagacatctgattgctgacctgtccagacatcatctggtctccctgaacctgaaatcacaccatggatgattttgagcgtcgcagagaacttagaaggcaaaagagggaggagatgcgactcgaagcagaaagaatcgcctaccagaggaatgacgatgatgaagaggaggcagcccgggaacgccgccgccgagcccgacaggaacggctgcggcagaagcaggaggaagaatccttgggacaggtgaccgaccaggtggaggtgaatgcccagaacagtgtgcctgacgaggaggccaagacaaccaccacaaacactcaagtggaaggggatgatgaggccgcattcctggagcgcctggctcggcgtgaggaaagacgccaaaaacgccttcaggaggctctggagcggcagaaggagttcgacccaacaataacagatgcaagtctgtcgctcccaagcagaagaatgcaaaatgacacagcagaaaatgaaactaccgagaaggaagaaaaaagtgaaagtcgccaagaaagatacgagatagaggaaacagaaacagtcaccaagtcctaccagaagaatgattggagggatgctgaagaaaacaagaaagaagacaaggaaaaggaggaggaggaagaggagaagccaaagcgagggagcattggagaaaatcaggtagaggtgatggtggaagagaaaacaactgaaagccaggaggaaacagtggtaatgtcattaaaaaatgggcagatcagttcagaagagcctaaacaagaggaggagagggaacaaggttcagatgagatttcccatcatgaaaagatggaagaggaagacaaggaaagagctgaggcagagagggcaaggttggaagcagaagaaagagaaagaattaaagccgagcaagacaaaaagatagcagatgaacgagcaagaattgaagcagaagaaaaagcagctgcccaagaaagagaaaggagagaggcagaagagagggaaaggatgagggaggaagagaaaagggcagcagaggagaggcagaggataaaggaggaagagaaaagggcagcagaggagaggcagaggataaaggaggaagagaaaagggcagcagaggagaggcagaggataaaagaggaagagaaaagggcagcagaggagaggcaaagggccagggcagaggaggaagagaaggctaaggtagaagagcagaaacgtaacaagcagctagaagagaaaaaacgtgccatgcaagagacaaagataaaaggggaaaaggtagaacagaaaatagaagggaaatgggtaaatgaaaagaaagcacaagaagataaacttcagacagctgtcctaaagaaacagggagaagagaagggaactaaagtgcaagctaaaagagaaaagctccaagaagacaagcctaccttcaaaaaagaagagatcaaagatgaaaagattaaaaaggacaaagaacccaaagaagaagttaagagcttcatggatcgaaagaagggatttacagaagttaagtcgcagaatggagaattcatgacccacaaacttaaacatactgagaatactttcagccgccctggagggagggccagcgtggacaccaaggaggctgagggcgccccccaggtggaagccggcaaaaggctggaggagcttcgtcgtcgtcgcggggagaccgagagcgaagagttcgagaagctcaaacagaagcagcaggaggcggctttggagctggaggaactcaagaaaaagagggaggagagaaggaaggtcctggaggaggaagagcagaggaggaagcaggaggaagccgatcgaaaactcagagaggaggaagagaagaggaggctaaaggaagagattgaaaggcgaagagcagaagctgctgagaaacgccagaagatgccagaagatggcttgtcagatgacaagaaaccattcaagtgtttcactcctaaaggttcatctctcaagatagaagagcgagcagaatttttgaataagtctgtgcagaaaagcagtggtgtcaaatcgacccatcaagcagcaatagtctccaagattgacagcagactggagcagtataccagtgcaattgagggaacaaaaagcgcaaaacctacaaagccggcagcctcggatcttcctgttcctgctgaaggtgtacgcaacatcaagagtatgtgggagaaagggaatgtgttttcatcccccactgcagcaggcacaccaaataaggaaactgctggcttgaaggtaggggtttctagccgcatcaatgaatggctaactaaaaccccagatggaaacaagtcacctgctcccaaaccttctgacttgagaccaggagacgtatccagcaagcggaacctctgggaaaagcaatctgtggataaggtcacttcccccactaaggtttgagacagttccagaaagaacccaagctcaagacgcaggacgagctcagttgtagagggctaattcgctctgttttgtatttatgttgatttactaaattgggttcattatcttttatttttcaatatcccagtaaacccatgtatattatcactatatttaataatcacagtctagagatgttcatggtaaaagtactgcctttgcacaggatcctgtttctaaagaaacccatgctgtgaaatagagacttttctactgatcatcataactctgtatctgagcagtgataccaaccacatctgaagtcaacagaagatccaagtttaaaattgctgcggaatgtgtgcagtatctagaaaaatgaaccgtagtttttgtttttttaaatacagaagtcatgttgtttctgcactttataataaagcatggaagaaattatcttagtaggcaattgtaacactttttgaaagtaacccatttcagatttgaaatactgcaataatggttgtctttaaaaaaaaaaagaatgtactgttaaggtattactttttttcatgctgatgattcatatctaaattacattattatgttagctgacagtggtactgattttttaggttggttgttttgtggatttctttagtagtgatagtagcctgaaccacattttagataactcaattatgtatgtatgtgcatacacatatacaaacacactaatggtagaatgcttttttatgtgctagactattatatttagtagtatgtcattgtaactagccaatatcacagcttttgaaaaattaaaaaatcatcatcactataatatttcatatttgccaacagaaacatggcagataggtatcaatatgttttcaatgcctgatgacctataagaagaaagtattgaaaagaagagagattagaactgttagaaggagttgaaattttctaaaagacatagtatttagtttataattaaatgcattcttgaagtcc

SEQ ID NO: 472 - DNA, 1389 bp, Homo sapiens
ctgggtgcagctctcttttcaggagagaaagctctcttggaggagctggaaaggtgcccgactccagccatgctggcgctactgtgttcctgcctgctcctggcagccggtgcctcggacgcctggacgggcgaggactcggcggagcccaactctgactcggcggagtggatccgagacatgtacgccaaggtcacggagatctggcaggaggtcatgcagcggcgggacgacgacggcacgctccacgccgcctgccaggtgcagccgtcggccacgctggacgccgcgcagccccgggtgaccggcgtcgtcctcttccggcagcttgcgccccgcgccaagctcgacgccttcttcgccctggagggcttcccgaccgagccgaacagctccagccgcgccatccacgtgcaccagttcggggacctgagccagggctgcgagtccaccgggccccactacaacccgctggccgtgccgcacccgcagcacccgggcgacttcggcaacttcgcggtccgcgacggcagcctctggaggtaccgcgccggcctggccgcctcgctcgcgggcccgcactccatcgtgggccgggccgtggtcgtccacgctggcgaggacgacctgggccgcggcggcaaccaggccagcgtggagaacgggaacgcgggccggcggctggcctgctgcgtggtgggcgtgtgcgggcccgggctctgggagcgccaggcgcgggagcactcagagcgcaagaagcggcggcgcgagagcgagtgcaaggccgcctgagcgcggcccccacccggcggcggccagggacccccgaggcccccctctgcctttgagcttctcctctgctccaacagacaccttccactctgaggtctcaccttcgcctctgctgaagtctccccgcagccctctccacccagaggtctccctataccgagacccaccatccttccatcctgaggaccgccccaaccctcggagccccccactcagtaggtctgaaggcctccatttgtaccgaaacaccccgctcacgctgacagcctcctaggctccctgaggtacctttccacccagaccctccttccccaccccataagccctgagactcccgcctttgacctgacgatcttcccccttcccgccttcaggttcctcctaggcgctcagaggccgctctggggggttgcctcgagtccccccacccctccccacccaccaccgctcccgcggcaagccagcccgtgcaacggaagccaggccaactgccccgcgtcttcagctgtttcgcatccaccgccaccccactgagagctgctcctttgggggaatgtttggcaacctttgtgttacagattaaaaattcagcaattc

SEQ ID NO: 473 - DNA, 1523 bp, Homo sapiens
gtgccgattcctgccctgccccgaccgccagcgcgaccatgtcccatcactgggggtacggcaaacacaacggacctgagcactggcataaggacttccccattgccaagggagagcgccagtcccctgttgacatcgacactcatacagccaagtatgacccttccctgaagcccctgtctgtttcctatgatcaagcaacttccctgaggatcctcaacaatggtcatgctttcaacgtggagtttgatgactctcaggacaaagcagtgctcaagggaggacccctggatggcacttacagattgattcagtttcactttcactggggttcacttgatggacaaggttcagagcatactgtggataaaaagaaatatgctgcagaacttcacttggttcactggaacaccaaatatggggattttgggaaagctgtgcagcaacctgatggactggccgttctaggtatttttttgaaggttggcagcgctaaaccgggccttcagaaagttgttgatgtgctggattccattaaaacaaagggcaagagtgctgacttcactaacttcgatcctcgtggcctccttcctgaatccctggattactggacctacccaggctcactgaccacccctcctcttctggaatgtgtgacctggattgtgctcaaggaacccatcagcgtcagcagcgagcaggtgttgaaattccgtaaacttaacttcaatggggagggtgaacccgaagaactgatggtggacaactggcgcccagctcagccactgaagaacaggcaaatcaaagcttccttcaaataagatggtcccatagtctgtatccaaataatgaatcttcgggtgtttccctttagctaagcacagatctaccttggtgatttggaccctggttgctttgtgtctagttttctagacccttcatctcttacttgatagacttactaataaaatgtgaagactagaccaattgtcatgcttgacacaactgctgtggctggttggtgctttgtttatggtagtagtttttctgtaacacagaatataggataagaaataagaataaagtaccttgactttgttcacagcatgtaggtgatgagcactcacaattgttgactaaaatgctgcttttaaaacataggaaagtagaatggttgagtgcaaatccatagcacaagataaattgagctagttaaggcaaatcaggtaaaatagtcatgattctatgtaatgtaaaccagaaaaaataaatgttcatgatttcaagatgttatattaaagaaaaactttaaaaattattatatatttatagcaaagttatcttaaatatgaattctgttgtaatttaatgacttttgaattacagagatataaatgaagtattatctgtaaaaattgttataattagagttgtgatacagagtatatttccattcagacaatatatcataacttaataaatattgtattttagatatattctctaataaaattcagaattct

SEQ ID NO: 474 - DNA, 2259 bp, Homo sapiens
gttctccccttcccggctttcggtccggaggaggcgggagcagcttccctgttctgatcctatcgcgggcggcgcagggccggcttggccttccgtgggacggggaggggggcgggatgtgtcacccaaataccagtggggacggtcggtggtggaaccagccgggcaggtcgggtagagtataagagccggagggagcggccgggcggcagacgcctgcagaccatcccagacgccggagcccgagccccgccgagtccccgcgcctcatccgcccgcgtccggtccgcgttcctccgccccaccatggctcggggccccggcctcgcgccgccaccgctgcggctgccgctgctgctgctggtgctggcggcggtgaccggccacacggccgcgcaggacaactgcacgtgtcccaccaacaagatgaccgtgtgcagccccgacggccccggcggccgctgccagtgccgcgcgctgggctcgggcatggcggtcgactgctccacgctgacctccaagtgtctgctgctcaaggcgcgcatgagcgcccccaagaacgcccgcacgctggtgcggccgagtgagcacgcgctcgtggacaacgatggcctctacgaccccgactgcgaccccgagggccgcttcaaggcgcgccagtgcaaccagacgtcggtgtgctggtgcgtgaactcggtgggcgtgcgccgcacggacaagggcgacctgagcctacgctgcgatgacctggtgcgcacccaccacatcctcattgacctgcgccaccgccccaccgccggcgccttcaaccactcagacctggacgccgagctgaggcggctcttccgcgagcgctatcggctgcaccccaagttcgtggcggccgtgcactacgagcagcccaccatccagatcgagctgcggcagaacacgtctcagaaggccgccggtgaagtggatatcggcgatgccgcctactacttcgagagggacatcaagggcgagtctctattccagggccgcggcggcctggacttgcgcgtgcgcggagaacccctgcaggtggagcgcacgctcatctattacctggacgagattcccccgaagttctccatgaagcgcctcaccgccggcctcatcgccgtcatcgtggtggtcgtggtggccctcgtcgccggcatggccgtcctggtgatcaccaaccggagaaagtcggggaagtacaagaaggtggagatcaaggaactgggggagttgagaaaggaaccgagcttgtaggtacccggcggggcaggggatggggtggggtaccggatttcggtatcgtcccagacccaagtgagtcacgcttcctgattcctcggcgcaaaggagacgtttatcctttcaaattcctgccttccccctcccttttgcgcacacaccaggtttaatagatcctggcctcagggtctcctttctttctcacttctgtcttgaaggaagcatttctaaaatgtatcccctttcggtccaacaacaggaaacctgactggggcagtgaaggaagggatggcacagcgttatgtgtaaaaaacaagtatctgtatgacaacccgggatcgtttgcaagtaactgaatccattgcgacattgtgaaggcttaaatgagtttagatgggaaatagcgttgttatcgccttgggtttaaattatttgatgagttccacttgtatcatggcctacccgaggagaagaggagtttgttaactgggcctatgtagtagcctcatttaccatcgtttgtattactgaccacatatgcttgtcactgggaaagaagcctgtttcagctgcctgaacgcagtttggatgtctttgaggacagacattgcccggaaactcagtctatttattcttcagcttgcccttactaccactgatattggtaatgttcttttttgtaaaatgtttgtacatatgttgtctttgataatgttgctgtaattttttaaaataaaacacgaatttaataaaatatgggaaaggcacaaaccagaagttggcatttgtgaaaagtccctccagatttctatcactttggtctctaatttcccaagacttgtattttttttttatttcaaattataacacttttttttcccccagaagtgggtgtttcatgttgctactctggtgtgtcccaagatatcctaactggccagtgtaaatgctattctttctaaataagattatttggaaacttccttcaaactgcag

SEQ ID NO: 475 - DNA, 4892 bp, Homo sapiens; identical to SEQ ID NO: 140

SEQ ID NO: 476 - DNA, 9980 bp, Homo sapiens
ggatcctgtaatatgcaacaacatggatggaactggaggtcattatgttaaatgaaataagccaggcagaaaaagacaaacattgcatgttatcacttatttgtgacagctaaaaattaaaacaattgaactcatagaggcaaagtactggatggttaccagaggcttggaagggtagtacagggcttgtggggagatggggatggctaatgcgtacaaaaaaattgaattaatgagacctatctggtagcagaacagagtgactatagtaaataataattgtacatttaaaaataactaaaagagtataactagattgtttataagacaaaagataaatgcttgaggggatggataccccatttaccatgatgtgattattacgcattgcatgcctgtatcaaagtatctcatgtaccctataaatatatatacctactacatacccacaaaaattaaaaattaaaaatgtaacacaaagaaagaaacagaaaagaatcacatttgaatagtcatgttaaaataacaagatagcaggtgcttttccttctttttttagagacagggtcttgctctgtcacccaggctacagtgcagtggcatgcagaggccaactcactgcagcctcaacctcctaggctcaagtgatcctcccacatcagcctccctaacagctgggactacaggtgcacaccaccatgcccaggtaatttctgtattttattgtagagatggggtcttgccatgttgctcaggctggtcttgaactcctggactcaagcaatctacccaccttggcctcccaaagtgctgggattacaggtgtgaaccactgtgcctggccctctaagtttctgctaaaatgtacttgtaacttttatactgactacacttaaaagtattaaacttgtaaagaaaaggccctggaggagtttgttctttacaaggtcagtcagaagctacaaggggccaggctggggccaaggtgagggcaggtacatgcaggggcagatgctgggtatggagtaggtgccaggtgctagctgggcatgaatgtgcacccgctccctgacctctgctccctgactctcagaaggaactagcactgcctggagacaggaagaagcagagtacggaaggcagactctctggccagagatctcgcagccaggagcacagtgagaacagagcctaagcctatctgtccagagcccaggctccctttccctacaactgcagcctccttattctggtctggcccagcagagtgaggaggggccacccacccagccatacctgctggtggctgctcggggtgcatgttcagaagaggaaaagatgcggttcaggtagtcattcagcagcttctcctgcacaatgcctgagccacaagtcagaagggagaaaagggccacatgatcagtgcagctcctggcccctgctggccccagagacttctggtcctaggccagccacaggtgcagcaaggcctgaggcctttgtcccttccttctcctcccaacaagaggagcctccttccttccctgccagctcttacctgtgaccctggatttctcagcatctgaggtcagcctatagctcttgcgggagaaagacatgccggcccccttggatgccatccttcatctctcatgggcagccagtggtcctgggggctgagccagacacagagcctgtctactcagggccagccaggggcccccacacctgacctcagtcctgccatggcaggaaggcttgggagcaggtgaggccaggggcatgcacactaacacatagggcaggggaatgcaggggactcccagcttcctacacagggagggtagccagggtctaggcccatgtaacagggaccacttcttgttctccagtgtccctgtgacccagcactagggactgggcagagagcaggtactagatatatttttgccgaaccataacaaaatgtctcagctctgtggaaatcagaccaaaatgtccaaagtgaggtgtccttgggtagagcccctgtatccatctcagttgtaagccatactgagtccagctcacaaccagaagcgacaatcctacacattcccccaagtgcagaccaccactggtctggtcatctctagccataagtcccacttactccccacaaggctggagcctctttcctcagccctgggttcctcccttcttttatccatggtcctgatagtttcaccattcccactcacacatgtggcctcccacctcatccaagcaccacccttgcccagccctcatggcaaactccattggtcctcctagtgcatctatccctcacatcatgttgctgctgcagctgctccagaacctgcactgagtccctggtgctggcctcactgatgtgtaggcgtgctgtccaacacagcagccgtcatccacatgaggttacttaaatttaaagttttaaaaattaacaattcgatttctcagttgccttagccacatttcaagagttcaatgaccacatgtggctaatggttactctgttggacagcacaaaggtagaacgttcccaccatcatataaagttctattagacagcgcaggtctagagtttcgctctgcagcactgccttagccagcactccctactctgcagttcagtctcttatctcaccccaaacagaccctctactcccgccacaaacccttgtgggtctgcaccacgcctgctcctcgggaaggtgattttcccgacctcgggccctcggtgggcgtccatgatcggtgccccttcactaccagagtagttgaagatctgattaaactcagtcattcatttgatgagcagaccttccagacacccggagtgggctccgggagtcagttgctgaggacccaggtgagaggcggaccttgtcccgcccgggactccctgtcacggctatcccgtccaaccccgccggggtatccggactcagaactgaacctactccgtctgggagcccaaggacggcgagggcgggcatggctcccccaagtcgcccccgcctggccccaagctccacaggacctgccagaccagctttccgctcggagtttcgcacccagatccctgcgctgcaggtgccctcgcactggactagcccggaccgcgaagggaatagccggaacccgccagctcagagccctgccgcccctcactcacccggagcctcggccgcagcgacccggctcacaacatccgcccaacctcttggctacggtgtccgttcagggccaaatcacgcgcacgcttgcgcgctgagcctccagccgcgcacgcgcactggcccgcgcccagcctccgctaggggaccccctccatggcttcccaccggttgttccaggcctcagcttcgccgaaagcctcaccacctccgacctccgcctgccctggggatgctcccagccctcgctgcggcagaacgcgacatgctaaccggaatccctaggccgcctgtctcctacccatacttagaggccccgctcagacggtccttaaaacgtctgaaaggccgttcctgccagagtccctgctacctgttacctccacccctatttagtcctagtggacagcctcgctcaccttccctgggatgacacttctggcggctgagatgagcgagcctctctggctctgccgccgggtgtgggctgacctgcctacagctggggcctgataaggcagcagcaaaagggtggaggggaggcagtgttgaagctggggcaagtaattttccccaatttacagggaaaaaccgaaattcagaaaagtttaatgtcacccaggggctggagcccagacctctggcagctctcactttcacaatgcccttgggctgactaggctgcagaggggtttcaccccaaccccagggcacctcaagtgtccccaccaaaccttcctaacacctgtccactaagctgtactaggcccttgcaactgacctatgggaccctgaggcctggcccctcatggctcctgtcaccaggtctcaggtcagggtccagcaggccctgagctgacgtgtggagccagagccacccaatcccgtagacaggtttcacaacttcccggatggggctgtggtgggtcacagtgcagcctccagccagaaggatggggtggctcccactcctgctgcttctgactcaatgcttaggggtccctggtaagtgcccccaaccctgatccccatctgccttcaggagggggttggccccattctcctattctaggatgagaaaaaagtcgggagcagaggctcagtgggcatggggcagtgaccttgccctcttgagcacagctgggaagccctaggaacacatagacattgcccacttaggcctctattagcacgtctgctctagcactgaagcagtgtcaggaccacacagatgcacgcacacagcaggcagtgacccctcctgagcctgatctacccctctaacctagcatatgcctttgtgcaggtgagagcccagatttggagtctgaatgcctagccagggcccttggctgggtaatgtgatggctctgagccttagcattctcatttgagagatgaggtggggcaagcttcatcacccactgctctcacagagcgtatgtgttagatctgagcccggtgcctgggccactaaacagaggcaccggtgataactaccaagtctgggcctgcttcccaggggaaatttttttcacaagtatctgtgcagggggctagactggcccttgaaagtgcatacagggtccatcccagaagcttgtagctttgatcccctgaatgaacaaagtgtggacatgccaatacacattactgacatgtatgcccacctgacctgcacccactcatgcctactctgcagggcagcgctcgccattgaatgacttccaagtgctccggggcacagagctacagcacctgctacatgcggtggtgcccgggccttggcaggaggatgtggcagatgctgaagagtgtgctggtcgctgtgggcccttaatggactgccggtgagtggccactgggctagataagactgggggcagggaagcctgggctgtggcgttaccctgtgccttcttctctccagggccttccactacaacgtgagcagccatggttgccaactgctgccatggactcaacactcgccccacacgaggctgcggcgttctgggcgctgtgacctcttccagaagaaaggcaagtgggggtggagaggggcagggtgggagacaggggacctcagcccaagttgatcttctgtctcttgctcccagactacgtacggacctgcatcatgaacaatggggttgggtaccggggcaccatggccacgaccgtgggtggcctgccctgccaggcttggagccacaagttcccgaatgatcacaagtgagacaaacaccttccctccgtcccggcctggggcttcccccagcacacactatagtgatgctctgggccctcaggtacacgcccactctccggaatggcctggaagagaacttctgccgtaaccctgatggcgaccccggaggtccttggtgctacacaacagaccctgctgtgcgcttccagagctgcggcatcaaatcctgccgggagggtaagcggcgccgggtcaagctgggagagtggagacaagcccacgtccatccacgaacccactggctctttgtctccagccgcgtgtgtctggtgcaatggcgaggaataccgcggcgcggtagaccgcacggagtcagggcgcgagtgccagcgctgggatcttcagcacccgcaccagcaccccttcgagccgggcaagtacgcgtaggcggtatcggcgtcctgggggccgggctagggaaggtccaggactccaggggcagggctccgtgtagggcaattgggcggggccagataagccagagtcccagggtcttgttcacgccccattaccgcccccaggttcctcgaccaaggtctggacgacaactattgccggaatcctgacggctccgagcggccatggtgctacactacggatccgcagatcgagcgagagttctgtgacctcccccgctgcggtaggcggcggggaccaggcctgggagggtacctgggaaccttggggaggggcgtggcttggccggggaggtaagaggggctgggcgtgacctgagagcataccccgtggagtaccgtacacctgggaaaggcgggtttggtcccagccccagagggatctcagctctcgctcggggcccgacctatctcggtccatctaagggtccgaggcacagccccgccaagaggccacaactgtcagctgcttccgcgggaagggtgagggctaccggggcacagccaataccaccactgcgggcgtaccttgccagcgttgggacgcgcaaatccctcatcagcaccgatttacgccagaaaaatacgcgtgcaagtgaggtggggggggggggcgggcgttgggacgtgctgctgcgggtgagacgggaggaaggtagtcacgggctcaaggctggaggctggcgggctagggctgagtggagcgcctgcttagagaccttcgggagaacttctgccggaaccccgacggctcagaggcgccctggtgcttcacactgcggcccggcatgcgcgcggccttttgctaccagatccggcgttgtacagacgacgtgcggccccagggtgaggcccaagcttgggggctacagagccgggctggaagctggaaccggaggccggggcgaggtctcggcctgatggctgcccgcacccgccacagactgctaccacggcgcaggggagcagtaccgcggcacggtcagcaagacccgcaagggtgtccagtgccagcgctggtccgctgagacgccgcacaagccgcagtgagtccctggtgctcccggccccgccagggccctaaccctggggcggcatgctttggtgtctgggaccagagcctggaaatggttgagactaccctgccacgattttgctcccgcttccgcctaggttcacgtttacctccgaaccgcatgcacaactggaggagaacttctgccggaacccagatggggatagccatgggccctggtgctacacgatggacccaaggaccccattcgactactgtgccctgcgacgctgcggtgagcactagtgacgcttcccccatgaccctgcctcagcccccacccaaaggctggctcccttaaccccagtgaactttgtctttcagctgatgaccagccgccatcaatcctggaccccccaggttaggagttgggccagttatgggtcaggccctttagcccacgacatccacacagtctgggtttcatccagcccaccccatcctacagaccaggtgcagtttgagaagtgtggcaagagggtggatcggctggatcagcggcgttccaagctgcgcgtggttgggggccatccgggcaactcaccctggacagtcagcttgcggaatcggtgaggcacaactgcctgtctcccacagagaggagctgaggttgtgtcctctgtggttatccactggggctgggaatctatccgtgccccttgagaggtcctagccaagaagatggcaggtcttacgaatctgtcccaggagtctgttacctgtcctaattccccactcctctaggcagggccagcatttctgcggggggtctctagtgaaggagcagtggatactgactgcccggcagtgcttctcctcctggtgagcctcccttgtgtttggggacccagtctcatcccaccttcccccttccccaggcaagctaacaagtgagccttggggcaatggactgagagtcacaaatgacctagcagagcttctctcccagccatatgcctctcacgggctatgaggtatggttgggcaccctgttccagaacccacagcatggagagccaagcctacagcgggtcccagtagccaagatggtgtgtgggccctcaggctcccagcttgtcctgctcaagctggagaggtatgtggacaacctgggagggtgtgaggtggggctgggccttgtggcctcagaccctgagtgcccccattcttgctaaagatctgtgaccctgaaccagcgtgtggccctgatctgcctgccccctgaatggtatgtggtgcctccagggaccaagtgtgagattgcaggctggggtgagaccaaaggtaagagcacagtgcacaggactgctggtggccaggaggccagccctggatcttcctgcaggaccctctccctctccccattcccctcactgcaggtacgggtaatgacacagtcctaaatgtggccttgctgaatgtcatctccaaccaggagtgtaacatcaagcaccgaggacgtgtgcgggagagtgagatgtgcactgagggactgttggcccctgtgggggcctgtgaggttggtggcagggcctgggcagccctggaagtatggggggctagaaatgaactattttatcatgaagcaggctagtcattgctgtggcccggggcctcatcagttctcctacctgccagggtgactacgggggcccacttgcctgctttacccacaactgctgggtcctggaaggaattataatccccaaccgagtatgcgcaaggtcccgctggccagctgtcttcacgcgtgtctctgtgtttgtggactggattcacaaggtcatgagactgggttaggcccagccttgatgccatatgccttggggaggacaaaacttcttgtcagacataaagccatgtttcctctttatgcctgtacagatgcttcttagcctttgcttccaggaaatgtgtcagtgactccttgctagggctcgggtggcttgagcccagcacaccctgggctaggtgatctgtccagcctaggggcttccccaaccaaggcaatgtccctgggactacttttgcccatgggtgccgtggaaagacagggcctcacactagtcctccagacatactcttgggaagggtggtacagagtagttgctaatggaaggggctgcagcagggaagctaggctggtacagagtcctggttgccaggacaggcagaggctaagcctctcactgttccctcccttctcacactggaggcagatgaagcccttgtggctgccacacccagaacctagggtctctgcaccccagagtgggaggtggggttggggatggtttggtacaaagtaccagcaggaaccaggctctgtgtcctaatttattatgactacatagcccacattcctctgcccatgcatccgtggagtccagagcccagaaagcctcctgctgccctgccagaccgttgagctcctcaagaggaagtgtggcacaggctgatcagctcatgcagaatggcagggcttcagctgcccaagtgtgtgcgtagccagagcacagcattcatgaagctgtctgactccacctccacctctgataatgcgtgggtgcttttgggatagagcaggagcctgtagggattagtcagcaacatttaaggttggagggtcctcctgtgctcacctgcccaccagctgccagggccttcatgctgcactcaccgaacaggcacattccgggtcttgagggcacggtaatactccatgccctgcttgaagggcacacgccggtcctcctggcccaacatcagtaacagtggtgtcttcacctgggtgtttggggaagagtggggagctgtgttgagctgggccctggattctggatggatgggcagcacacagggcaagcagggggctgcatacctgagggatgtatctgatgggcgatttgtccagcatctcagcccacacgctgaggtctggcaggcagtcactgctgaaaggaaagccagcctccaccacgcacctgcaagacaccgagctgttgcagccccaggaa

SEQ ID NO: 477 - DNA, 147 bp, Homo sapiens
cattcattcactcaggcttagagaaacctccaggagactgctaccatggcagagaagcccaagctccactactccaatacacggggcagaatggagtccatccggtggctcctggctgcagctggagtagaggtaggttctgagtta

SEQ ID NO: 478 - DNA, 2441 bp, Homo sapiens
tggtctgtgtatataacaactataacttgttttagatcagagttgactgcaataatgaaaggagtgtccacactaaaacattacagaatacctccagtgaaggtagtcggctgcgcacgggtaaagatcgtaaccagaagaaagagaagccagacagcgtggatggtcagcaaccactcgtgaatggagtaccctaaactgcataattctgaagttatatttcctataccatttccgtaattcttattccatattagaaaactttgttaggccaaagacaaatagtaggcaagatggcacagggcatgaaatgaacacaaattatgctaagaattttttattttttggtattggccataagcaacaattttcagatttgcacaaaaagataccttaaaatttgaaacattgcttttaaaactacttagcacttcagggcagattttagttttattttctaaagtactgagcagtgatattctttgttaatttggaccattttcctgcattgggtgatcattcaccagtacattctcagtttttcttaatatatagcatttatggtaatcatattagacttctgttttcaatctcgtatagaagtcttcatgaaatgctatgtcatttcatgtcctgtgtcagtttatgttttggtccacttttccagtattttagtggaccctgaaatgtgtgtgatgtgacatttgtcattttcattagcaaaaaaagttgtatgatctgtgccttttttatatcttggcaggtaggaatattatatttggatgcagagttcagggaagataagttggaaacactaaatgttaaagatgtagcaaaccctgtcaaacattagtactttatagaagaatgcatgctttccatatttttttccttacataaacatcaggttaggcagtataaagaataggacttgtttttgtttttgttttgttgcactgaagtttgataaatagtgttattgagagagatgtgtaatttttctgtatagacaggagaagaaagaactatcttcatctgagagaggctaaaatgttttcagctaggaacaaatcttcctggtcgaaagttagtaggatatgcctgctctttggcctgatgaccaattttaacttagagcttttttttttaattttgtctgccccaagttttgtgaaatttttcatattttaatttcaagcttattttggagagataggaaggtcatttccatgtatgcataataatcctgcaaagtacaggtactttgtctaagaaacattggaagcaggttaaatgttttgtaaactttgaaatatatggtctaatgtttaagcagaattggaaaagactaagatcggttaacaaataacaacttttttttctttttttcttttgttttttgaagtgttggggtttggttttgttttttgagtcttttttttttaagtgaaatttattgaggaaaaatatgtgaaggaccttcactctaagatgttatatttttcttaaaaagtaactcctagtaggggtaccactgaatctgtacagagccgtaaaaactgaagttctgcctctgatgtattttgtgagtttgtttctttgaattttcattttacagttacttttccttgcatacaaacaagcatataaaatggcaacaaactgcacatgatttcacaaatattaaaaagtcttttaaaaagtattgccaaacattaatgttgatttctagttatttattctgggaatgtatagtatttgaaaacagaaattggtaccttgcacacatcatctgtaagctgtttggttttaaaatactgtagataattaaccaaggtagaatgaccttgtaatgtaactgctcttgggcaatattctctgtacatattagcgacaacagattggattttatgttgacatttgtttggttatagtgcaatatattttgtatgcaagcagtttcaataaagtttgatcttcctctgctaaattgatgttgatgcaatccttacaaatgattgcttttaaaattttaagctaggaaaagaaatctatagaaagtgttctgttacaaaatgtaactgttaccattggaaatttcacgtcataggaagttagcctttatctacccaactttcaagaaggttctttaataaagcgaaaactcaaccaaatggtacttttccacagtgtaccattaaaatatgcactagtctctttttacaaggctgtattcagcaagggcctaacttgcttaaagtgtaattactaacttctaaaactgtactttgattcacatgttttcaaatggagttggagttcattcatattacaatatttgtgtgctaaacgtgtatgtttttcagttcaaagtcatgatgtttttaaaatcttattaaagtttcaaaaatctgaagattgtttatctagatgtaaatttt

SEQ ID NO: 479 - DNA, 3110 bp, Homo sapiens
agtgcactccgtgaaggcaaagagaacacgctgcaaaaggctttccaataatcctcgacatggcaaggaggagctcgttccagtcgtgtcagataatatccctgttcacttttgccgttggagtcaatatctgcttaggattcactgcacatcgaattaagagagcagaaggatgggaggaaggtcctcctacagtgctatcagactccccctggaccaacatctccggatcttgcaagggcaggtgctttgaacttcaagaggctggacctcctgattgtcgctgtgacaacttgtgtaagagctataccagttgctgccatgactttgatgagctgtgtttgaagacagcccgtgcgtgggagtgtactaaggacagatgtggggaagtcagaaatgaagaaaatgcctgtcactgctcagaggactgcttggccaggggagactgctgtaccaattaccaagtggtttgcaaaggagagtcgcattgggttgatgatgactgtgaggaaataaaggccgcagaatgccctgcagggtttgttcgccctccattaatcatcttctccgtggatggcttccgtgcatcatacatgaagaaaggcagcaaagtcatgcctaatattgaaaaactaaggtcttgtggcacacactctccctacatgaggccggtgtacccaactaaaacctttcctaacttatacactttggccactgggctatatccagaatcacatggaattgttggcaattcaatgtatgatcctgtatttgatgccacttttcatctgcgagggcgagagaaatttaatcatagatggtggggaggtcaaccgctatggattacagccaccaagcaaggggtgaaagctggaacattcttttggtctgttgtcatccctcacgagcggagaatattaaccatattgcagtggctcaccctgccagatcatgagaggccttcggtctatgccttctattctgagcaacctgatttctctggacacaaatatggccctttcggccctgagatgacaaatcctctgagggaaatcgacaaaattgtggggcaattaatggatggactgaaacaactaaaactgcatcggtgtgtcaacgtcatctttgtcggagaccatggaatggaagatgtcacatgtgatagaactgagttcttgagtaattacctaactaatgtggatgatattactttagtgcctggaactctaggaagaattcgatccaaatttagcaacaatgctaaatatgaccccaaagccattattgccaatctcacgtgtaaaaaaccagatcagcactttaagccttacttgaaacagcaccttcccaaacgtttgcactatgccaacaacagaagaattgaggatatccatttattggtggaacgcagatggcatgttgcaaggaaacctttggatgtttataagaaaccatcaggaaaatgctttttccagggagaccacggatttgataacaaggtcaacagcatgcagactgtttttgtaggttatggcccaacatttaagtacaagactaaagtgcctccatttgaaaacattgaactttacaatgttatgtgtgatctcctgggattgaagccagctcctaataatgggacccatggaagtttgaatcatctcctgcgcactaataccttcaggccaaccatgccagaggaagttaccagacccaattatccagggattatgtaccttcagtctgattttgacctgggctgcacttgtgatgataaggtagagccaaagaacaagttggatgaactcaacaaacggcttcatacaaaagggtctacagaagagagacacctcctctatgggcgacctgcagtgctttatcggactagatatgatatcttatatcacactgactttgaaagtggttatagtgaaatattcctaatgccactctggacatcatatactgtttccaaacaggctgaggtttccagcgttcctgaccatctgaccagttgcgtccggcctgatgtccgtgtttctccgagtttcagtcagaactgtttggcctacaaaaatgataagcagatgtcctacggattcctctttcctccttatctgagctcttcaccagaggctaaatatgatgcattccttgtaaccaatatggttccaatgtatcctgctttcaaacgggtctggaattatttccaaagggtattggtgaagaaatatgcttcggaaagaaatggagttaacgtgataagtggaccaatcttcgactatgactatgatggcttacatgacacagaagacaaaataaaacagtacgtggaaggcagttccattcctgttccaactcactactacagcatcatcaccagctgtctggatttcactcagcctgccgacaagtgtgacggccctctctctgtgtcctccttcatcctgcctcaccggcctgacaacgaggagagctgcaatagctcagaggacgaatcaaaatgggtagaagaactcatgaagatgcacacagctagggtgcgtgacattgaacatctcaccagcctggacttcttccgaaagaccagccgcagctacccagaaatcctgacactcaagacatacctgcatacatatgagagcgagatttaactttctgagcatctgcagtacagtcttatcaactggttgtatatttttatattgtttttgtatttattaatttgaaaccaggacattaaaaatgttagtattttaatcctgtaccaaatctgacatattatgcctgaatgactccactgtttttctctaatgcttgatttaggtagccttgtgttctgagtagagcttgtaataaatactgcagcttgagtttttagtggaagcttctaaatggtgctgcagatttgatatttgcattgaggaaatattaattttccaatgcacagttgccacatttagtcctgtactgtatggaaacactgattttgtaaagttgcctttatttgctgttaactgttaactatgacagatatatttaagccttataaaccaatcttaaacataataaatcacacattcagttttttctggtaaaaaaaaaaaaaaaaa

SEQ ID NO: 480 - DNA, 2300 bp, Homo sapiens
cagcacgtctcttgctcctcagggccactgccaggcttgccgagtcctgggactgctctcgctccggctgccactctcccgcgctctcctagctccctgcgaagcaggatggccgggaccgtgcgcaccgcgtgcttggtggtggcgatgctgctcagcttggacttcccgggacaggcgcagcccccgccgccgccgccggacgccacctgtcaccaagtccgctccttcttccagagactgcagcccggactcaagtgggtgccagaaactcccgtgccaggatcagatttgcaagtatgtctccctaagggcccaacatgctgctcaagaaagatggaagaaaaataccaactaacagcacgattgaacatggaacagctgcttcagtctgcaagtatggagctcaagttcttaattattcagaatgctgcggttttccaagaggcctttgaaattgttgttcgccatgccaagaactacaccaatgccatgttcaagaacaactacccaagcctgactccacaagcttttgagtttgtgggtgaatttttcacagatgtgtctctctacatcttgggttctgacatcaatgtagatgacatggtcaatgaattgtttgacagcctgtttccagtcatctatacccagctaatgaacccaggcctgcctgattcagccttggacatcaatgagtgcctccgaggagcaagacgtgacctgaaagtatttgggaatttccccaagcttattatgacccaggtttccaagtcactgcaagtcactaggatcttccttcaggctctgaatcttggaattgaagtgatcaacacaactgatcacctgaagttcagtaaggactgtggccgaatgctcaccagaatgtggtactgctcttactgccagggactgatgatggttaaaccctgtggcggttactgcaatgtggtcatgcaaggctgtatggcaggtgtggtggagattgacaagtactggagagaatacattctgtcccttgaagaacttgtgaatggcatgtacagaatctatgacatggagaacgtactgcttggtctcttttcaacaatccatgattctatccagtatgtccagaagaatgcaggaaagctgaccaccactattggcaagttatgtgcccattctcaacaacgccaatatagatctgcttattatcctgaagatctctttattgacaagaaagtattaaaagttgctcatgtagaacatgaagaaaccttatccagccgaagaagggaactaattcagaagttgaagtctttcatcagcttctatagtgctttgcctggctacatctgcagccatagccctgtggcggaaaacgacaccctttgctggaatggacaagaactcgtggagagatacagccaaaaggcagcaaggaatggaatgaaaaaccagttcaatctccatgagctgaaaatgaagggccctgagccagtggtcagtcaaattattgacaaactgaagcacattaaccagctcctgagaaccatgtctatgcccaaaggtagagttctggataaaaacctggatgaggaagggtttgaaagtggagactgcggtgatgatgaagatgagtgcattggaggctctggtgatggaatgataaaagtgaagaatcagctccgcttccttgcagaactggcctatgatctggatgtggatgatgcgcctggaaacagtcagcaggcaactccgaaggacaacgagataagcacctttcacaacctcgggaacgttcattccccgctgaagcttctcaccagcatggccatctcggtggtgtgcttcttcttcctggtgcactgactgcctggtgcccagcacatgtgctgccctacagcaccctgtggtcttcctcgataaagggaaccactttcttatttttttctatttttttttttttgttatcctgtatacctcctccagccatgaagtagaggactaaccatgtgttatgttttcgaaaatcaaatggtatcttttggaggaagatacattttagtggtagcatatagattgtccttttgcaaagaaagaaaaaaaaccatcaagttgtgccaaattattctcctatgtttggctgctagaacatggttaccatgtctttctctctcactccctccctttctatcgttctctctttgcatggatttctttgaaaaaaaataaattgctcaaataaaaaaaaaaaaaaaaaaaaaaaaaaaaaaaaaaaaaaaaaaaaaaaaaaaaaaaaaaaaaaaaaaaaaaaaaaa

SEQ ID NO: 481 - DNA, 1629 bp, Homo sapiens
gacagccccactccaatgactttttccctcctaattacccttttaaataaaatttatgaaggttttcataaattttaaaactgatttacacactttaataaaagcatgtgatggacagggagtattaggctgcagattttctacaatgaaattgacgtgagcacatcccagattatcaagtttgggagctgccccctcccccagcctccaagagctccccgcttgctcaggattgacaaatgtgtctctttcttggcagacaacagtgagctgggacggagacaagctccagtgtgtgcagaagggtgagaaggaggggcgtggctggacccagtggatcgagggtgatgagctgcacctggtaggttcctgggctgggtcaggccgggtccccagaggccctgtcattgttgaggtccagatggaccttggaaaaaggcaccatggatgggccttggttctgttctaaagcttctcttccaagggcctggaaaagatgcctgggtgactttaaaaaccaagcaatgtattttcaaggtctaggctgacccaatcatctaatcagagggaagaggtgaggagttatatccattaagcatcagcaatgagctaagcccttttgcattctataactctattctctcagaataggaatatggctcttattttagagatgaggacctgggggctctgaaagattagattacatgtccaaattgcacatctagaaagtggcagaacaaacatttgctcccaaatgatgtatatattcaccatgccaaattgtataggccaaagccaagaaggattctctaagcttctctaagatatgatctcaatctgggtcagcgggaggtgattcgggaggggaagcgtcaaggggtcctgttggtcagctctgagccacatccattcctctcagccagctctgtctgtagggtgctgcagagcactccactatacagtttaactgtctttccaaacaattggttacttaaaccaactcttggggaaaaataacagccaatgagtatttttagagttcttgccgtaagtgtgactctgctctggccaatgaccaacatctgcttttgtttcaggagatgagagtggaaggtgtggtctgcaagcaagtattcaagaaggtgcagtgaggcccaggcagacaaccttgtcccaaggaatcagcaggatgtgtgggccaggatccccctctttgcacagcatgaggcaaaaatgtccagccacccccaggcatctgttagcagagtctgtctcttggctttgtcacttttccttttcttaaaacaaagccatgccaataaagtgatctgtgttcaaaacgtctgtttgggggaagtttcactgcccactgtgctcactttttctccagggcttctgaggccagcttctcctagtgccacccatgggcagagtggataaattcagccacatgtcctgaaattgcaccgtgtttctctccagaggcacaggcttgggtctagaatgggaggtgggagagtggcctgacattcaatcatttgtgtatcaagtagctaccatgttatgtatctaattgtggccaaagtatagtgagtgccacaaagcaggagagtaccttcctcccta

SEQ ID NO: 482 - DNA, 1450 bp, Homo sapiens
gatgcacttgagcagggaagaaatccacaaggactcaccagtctcctggtctgcagagaagacagaatcaacatgagcacagcaggaaaagtaatcaaatgcaaagcagctgtgctatgggagttaaagaaacccttttccattgaggaggtggaggttgcacctcctaaggcccatgaagttcgtattaagatggtggctgtaggaatctgtggcacagatgaccacgtggttagtggtaccatggtgaccccacttcctgtgattttaggccatgaggcagccggcatcgtggagagtgttggagaaggggtgactacagtcaaaccaggtgataaagtcatcccactcgctattcctcagtgtggaaaatgcagaatttgtaaaaacccggagagcaactactgcttgaaaaacgatgtaagcaatcctcaggggaccctgcaggatggcaccagcaggttcacctgcaggaggaagcccatccaccacttccttggcatcagcaccttctcacagtacacagtggtggatgaaaatgcagtagccaaaattgatgcagcctcgcctctagagaaagtctgtctcattggctgtggattttcaactggttatgggtctgcagtcaatgttgccaaggtcaccccaggctctacctgtgctgtgtttggcctgggaggggtcggcctatctgctattatgggctgtaaagcagctggggcagccagaatcattgcggtggacatcaacaaggacaaatttgcaaaggccaaagagttgggtgccactgaatgcatcaaccctcaagactacaagaaacccatccaggaggtgctaaaggaaatgactgatggaggtgtggatttttcatttgaagtcatcggtcggcttgacaccatgatggcttccctgttatgttgtcatgaggcatgtggcacaagtgtcatcgtaggggtacctcctgattcccaaaacctctcaatgaaccctatgctgctactgactggacgtacctggaagggagctattcttggtggctttaaaagtaaagaatgtgtcccaaaacttgtggctgattttatggctaagaagttttcattggatgcattaataacccatgttttaccttttgaaaaaataaatgaaggatttgacctgcttcactctgggaaaagtatccgtaccattctgatgttttgagacaatacagatgttttcccttgtggcagtcttcagcctcctctaccctacatgatctggagcaacagctgggaaatatcattaattctgctcatcacagattttatcaataaattacatttgggggctttccaaagaaatggaaattgatgtaaaattatttttcaagcaaatgtttaaaatccaaatgagaactaaataaagtgttgaacatcagctggggaattgaagccaataaaccttccttctt

SEQ ID NO: 483 - DNA, 4466 bp, Homo sapiens
tctagatctctagtctataagaccagaggagacagtggctacacatataaatttcagtgtcttccactgatatccgagtgataagcaacttcctttctaaaattatgaaagtaactaagggtctaaaaaaaatttctagtgcggtagtcttaaaactacaaatagttttgtcatatctcctatgatgactccctcccttcagctgcctggagcccaggggtgggcagtgactttgtgtaggcagcaagcagccggtaacaaaataataattattattgttattattatattataataattgtaacaataacaattattattgaagctcatttacaactaaccatccaaaagacctctttcccctgtgtcttcaatccccaaggcagaggggtagggacagttctatccctcctctgcacttaacccttgaaacacatgcacccctttgtgactttaccctctgcagatggctctgaatgtcttaatgtctgagagaaagggatttagaaagcaaaatataaaaattttaaactagtccttcctaccttcctagaagtggcaagagttaaatgttgagatagactcaagggtaggatgactatttcagtttgcctggaagtgtttcagtttgcctggaagtatctcagttttagtgctcagttttagcaggagtcctgcatttcagagaacccctcaaccctgagcaaaataagatggttggtcaccctatggcttggtttgaccatcatcgctataacctgtatcttacctgcatgcatgacacaacacagtgctttacttccctaaaaatgacatcagccccactaaaatatatgtttagtttccaagccctacctagtcaccttctaccctaggagccaggttctcttttcccacccagacagaggagctgcactcagaaattcctagacatgagttaacactggattccttagccttctactcccatcatctcctgctcagccccagctaccacctaaactaggaagatcaagtctaccagtgacctccgtccatggcacttgctgcccctcctctgtccagctcttaccaatatagctgctggaacctggaggtcaaagtcaaattatcaaaaaaaggaactgagctggtgatgtgcactaacacagcaaatcacaggaaaggggaacccaggtaaattacagccttctgacctaggaagacgtgtggtttgcgtctctgagttacagaaacacaggaaatgcttactggaccagtcaatttcagaattttgggtcccaagctaggctgactcaccttcagaatggaaaccacgtgacagcccttatatcagggcacacatcacatgctcttccagaagtcaatgggtttggaaccctcacagatattgggaaagctcactaatcatttctgccagttatcagaggttgctctgaaactataaggaagattcaaagaaaatgccaagactgatattaaacttggcaggaacccttgttacagaattttcctgcctgacaaggttaaaagaacaataagcaggaaacacagtcctccaggaataatcaattctatttggcccctggtcaccttcactcagactaaattctaaaacatagaatttcaaataagctatttagataaccttgaccattctccacacacaagcccttgcctgaactattaatagtcaaggcaaagggtagttgttattgctgcctttttaaactgaatcatctgagaaattgcttcagacccccaaagaaagattactgttaacaattcaaaaactaaaatatttgatccctgagacagccttttcccccgacccgcccttcagggctcagtccgaccgactgcaaaggctgttgcaagattgcatcactgacctttgcaattttctggccagtttgattccccttctttcccctgccccctccctttctctgcttaaaggcctttggccaatttgcctctccttttccccaagtttgctaaccctttggccaatttgcctctctttttccccaagtttgctaactctagcatatccataaccaaagccaaactagaacgctccctcagccccaggtgattacagctaaccctggtcaaaatcaatcctacatcttcacacgtccaagagtactcacactctggattcttacctaagctgtctactacacgcccttctgcccacaaactgcttcaaagctgaagttgagctggagcagtgaagttgtacccccaaacccaggagggtggcagagaattattgaggagagcatgaaatacttccattctaaaatggcaagatgaacttctaccaacagccccttccatacttgaccccctacccccaagctcccaactccacttctcaagtggaagtgagaacaatttgaatttgaaggctcttccctgatacacggaagtacataaggaaacagctcgcaggcaaagagactaatctctctctctctctctctctctctctctctctctctctcacacacacacacacacacacacacacacacacctctgtgcataaaagcaccatcaatgaatagttttctatcaactgactctagttatacatgcatgtacctctaaataaaaccaaccaggcaggaaagaaacaatattagcacatattgctttatccaagcgtaacctgttctgtcctgttacccagatccttcccccttgccttctcctctctgatccattgccacacacgtgggaaggtgacaacccttccgaataaaaatgaaagctttcttctttagatggaacccccaaattccctcattatttataatgtcaggctgtcctggacaagggaagctgtgcacccgctgacaccagtaagaaggttgccgccatgtcagagatgtccgcggacacctccctgggctccgggtcctcccctgcgctcgcctggagtgggaccttcgcgtgcacactggccttcccacgcgccccgctgcgatggcacccgcgccgggccccctagctcacacagtcggagcgtgctcagcgcgtggccacctcttgccaggtcccagccgggttccaccccctccttttcccctcctcttcttcctccccctccgagttcccctggctctgaccgcgctggcctgggcccgagagcccaggaggcgtgtctcagagaaaagatataagcggcccccggacgctaaagcggtgccagcggcggagtctccaactgggagagctgcagctgccgagaggaggagaacgctgaggtcggtcggaccaacggacgcgctgaccgctgccaactgcagctcgcgctgcctcctgctcgcgccgtgccactaaggtagtccgcctttctatgagccctccccaagattagctgggtgcggggtggtgggagccgttctttggtggctgaagcccctctcctgctgctcctcctgcaggtcattcccgcctccgagagcccagagccgagatggaaacggtccaggagctgatccccctggccaaggagatgatggcccagaagcgcaaggggaagatggtgaagctgtacgtgctgggcagcgtgctggccctcttcggcgtggtgctcggcctgatggagactgtgtgcagccccttcacggccgccagacgtctgcgggaccaggaggcagccgtggcggagctgcaggccgccctggagcgacaggctctccagaagcaagccctgcaggagaaaggcaagcagcaggacacggtcctcggcggccgggccctgtccaaccggcagcacgcctcctaggaactgtgggagaccagcggagtgggagggagacgcagtagacagagacagaccgagagaggaagggagagacagagggggcgcgcgcacaggagcctgactccgctgggagagtgcaggagcacgtgctgttttttatttggacttaacttcagagaaaccgctgacatctagaactgacctaccacaagcagccaccaaaggagtttgggattgagttttgctgctgtgcagcactgcattgtcatgacatttccaacactgtgtgaattatctaaatgcgtctaccattttgcactagggaggaaggataaatgctttttatgttattattattaattattacaatgaccaccattttgcattttgaaataaaaaactttttataccatatctcatgtaattcctgagaggtgtggtgtcctggggtgggaagcagggagggtgagcaggtgggcgatggtgatgggttcttacctgagcactgcagagggagcagcttcctgagggtcagacacttgcttcacacctaggaactgtgtaataagttactacatgcatataagtctgttgaggacttgtttttccttcttgttaggggtgggaagagagaaaattttataacttccgtgagatttagcattttaacatcaaaaggtagatc

SEQ ID NO: 484 - DNA, 640 bp, Homo sapiens
attctgagccgagcccggtgccaagcgcagctagctcagcaggcggcagcggcggcctgagcttcagggcagccagctcctcccggtctcgccttcctcgcggtcagcatgaaagccttcagtcccgtgaggtccgttaggaaaaacagcctgtcggaccacagcctgggcatctcccggagcaaaacccctgtggacgacccgatgagcctgctatacaacatgaacgactgctactccaagctcaaggagctggtgcccagcatcccccagaacaagaaggtgagcaagatggaaatcctgcagcacctcatcgactacatcttggacctgcagatcgccctggactcgcatcccactattgtcagcctgcatcaccagagacccgggcagaaccagcgctccaggacgccgctgaccaccctcaacacggatatcagcatcctgtccttgcaggcttctgaattcccttctgagttaatgtcaaatgacagcaaagcactgtgtggctgaataagcggtgttcatgatttcttttattctttgcacaacaacaacaacaacaaattcacggaatcttttaagtgctgaacttatttttcaaccatttcacaaggaggacaagttgaatggacctttt

SEQ ID NO: 485 - DNA, 1774 bp, Homo sapiens
gaggcaatggccggcaaccagctgtaagcgaggcacggaagacatatgcttgtgagacaaaggtgtctctgaaactatggatggtacaagaacttcacttgacattgaagagtactcggatactgaggtacagaaaaaccaagtactaactctggaagaatggcaagacaagtgggtgaacggcaagactgcttttcatcaggaacaaggacatcagctattaaagaagcatttagatactttccttaaaggcaagagtggactgagggtattttttcctctttgcggaaaagcggttgagatgaaatggtttgcagaccggggacacagtgtagttggtgtggaaatcagtgaacttgggatacaagaattttttacagagcagaatctttcttactcagaagaaccaatcaccgaaattcctggaaccaaagtatttaagagttcttcggggaacatttcattgtactgttgcagtatttttgatcttcccaggacaaatattggcaaatttgacatgatttgggatagaggagcattagttgccattaatccaggtgatcgcaaatgctatgcagatacaatgttttccctcctgggaaagaagtttcagtatctcctgtgtgttctttcttatgatccaactaaacatccaggtccaccattttatgttccacatgctgaaattgaaaggttgtttggtaaaatatgcaatatacgttgtcttgagaaggttgatgcttttgaagaacgacataaaagttggggaattgactgtctttttgaaaagttatatctacttacagaaaagtaaatgagacatagataaaataaaatcacactgacatgtttttgaggaattgaaaattatgctaaagcctgaaaatgtaatggatgaatttttaaaattgtttataaatcatatgatagatctttactaaaaatggctttttagtaaagccatttactttttctaaaaaagttttagaagaaaaagatgtaactaaacttttaaagtagctcctttggagaggagattatgatgtgaaagattatgcctatgtgtcttgcagattgcaagatattttaccaatcagcatgtgttacctgtacaattaaaaaaatatttcaaaatgcaatgcatattaaatataatacacacagaaaaactggcatttattttgttttatttttttgagatggagtttcgttcttgttgcccaacctggagtgcaatggtgcaatctcagctcactgcaacctctgcctcccaggttcaggtgattctcctgcctcagcctcctgagtagctgggattacaggtgtgcgccaccacgcccagctaattttttgtatttttagtagagacagggtttcaccatgttggtcaggctgatctcgagctcctgacctcaggtgatctacccacctcggcctcccaaagtgctgggattacaggcgtgagccactgcacctggcctgacattctttatgaaatttagaattgttgaagaactataacatttcagtagggttcaaggtggtcccaaaagttatataaaagattagtttttactataaacccttgtcttttactcagatcctagcatcccttttcacatggtttctccatgtatataacagaatcaagaaacaaattttaattaaacaatctgtaacagaatcaagaaacaaatacattttaattaaacaatctatatggaacaaacattcccaaattctaagaataaatttttctttaagttttctctga

SEQ ID NO: 486 - DNA, 2296 bp, Homo sapiens
atgataaatttaatcccgtttcagaccttgaaggaagtaattttgaagttattggcaacatacatcaatattctaatttattagttgatgacaccgaccgtatcagtcctgatgacatcggcaatgatattcatgagtttttacacggaggagataagtgatggctgttgaatatgaaaatggtggtcatggttacgtggaacatgcatctataggaggcgttattgtacacgtgttttatgcagacgataaggaagaggaggataaataatgttagataactttgttgaattgaaaaataagtatgccgatgaacttggaaaccgtggtagaaagtgtgatgagatgaaattcaccagcgaaaaagttaatgaattgatcggtgttgatgaagcgtttaaagttccaaacaagttaatgtcaatcatgatgaatcgtgaacaacgtgagcaaacgtttaaagcatttttggaagttgagcgtgatacatcattcgattggttccatgaatattttgaagagcacccaggcagctacggcttcctcccggaactcctgtgcagctgacgacaaagccactgagcctctgcccaaggactgccctgtctcttcttacaacgaatgggaccccttagaggaagtgatagtgggcagagcagaaaacgcctgtgttccaccgttcaccatcgaggtgaaggccaacacatatgaaaagtactggccattttaccagaagcaaggagggcattattttcccaaagatcatttgaaaaaggctgttgctgaaattgaagaaatgtgcaatattttaaaaacggaaggagtgacagtaaggaggcctgaccccattgactggtcattgaagtataaaactcctgattttgagtctacgggtttatacagtgcaatgcctcgagacatcctgatagttgtgggcaatgagattatcgaggctcccatggcatggcgttcacgcttctttgagtaccgagcgtacaggtcaattatcaaagactacttccaccgtggcgccaagtggacaacagctcctaagcccacaatggctgatgagctttataaccaggattatcccatccactctgtagaagacagacacaaattggctgctcagggaaaatttgtgacaactgagtttgagccatgctttgatgctgctgacttcattcgagctggaagagatatttttgcacagagaagccaggttacaaactacctaggcattgaatggatgcgtaggcatcttgctccagactacagagtgcatatcatctcctttaaagatcccaatcccatgcatattgatgctaccttcaacatcattggacctggtattgtgctttccaaccctgaccgaccatgtcaccagattgatcttttcaagaaagcaggatggactatcattactcctccaacaccaatcatcccagacgatcatccactctggatgtcatccaaatggctttccatgaatgtcttaatgctagatgaaaaacgtgttatggtggatgccaatgaagttccaattcaaaagatgtttgaaaagctgggtatcactaccattaaagttaacattcgtaatgccaattccctgggaggaggcttccattgctggacctgcgatgtccggcgccgaggcaccttacagtcctacttggactgaacaggcctgatggagcttgtggctggcctcagatacacctaagaagcttaggggcaaggttcattctcctgctttaaaaagtgcatgaactgtagtgctttaaacaatcatctccttaacaggggtcgtaagcctggtttgcttctattacttttctttgacataaagaaaataacttctgctaggtattactctctactcctaaagttatttactatttggcttcaagtataaaattttggtgaatgtgtaccaagaaaaaattagtcacctgagtaacttggccactaataattaaccatctacctctgtttttaattttctttccaaaaggcagcttgaaatgttggtcctaatcttaattttttttcctcttctatagacttgagaatgtttttctctaaatgagagaaagacttagaatgtacacagatccaaaatagaatcagattatctctttttttctaaaggagagaaagacttagaacatacacagatcctaagtagaaccaggtaattgtctctttttctaataaggaatttgggtaatttttaattttttgttttttaaaaaataacctagactatgcaaaacatcaaagccggaattctttt

SEQ ID NO: 487 - DNA, 1096 bp, Homo sapiens
gcgaagatggcagctgctgaggaggagccgaagcccaaaaagctgaaggtggaggcgcccgcaagccgtgagagaaaatattctctttggaatggggaatcctcttcttgacatctctgctgtagtggacaaagatttccttgataagtattctctgaaaccaaatgaccaaatcttggctgaagacaaacataaggaactgtttgatgaacttgtgaaaaaattcaaagtcgaatatcatgctggtggctctacccagaattcaattaaagtggctcagtggatgattcaacagccacacaaagcagcaacattttttggatgcattgggatagataaatttggggagatcctgaagagaaaagctgctgaggcccatgtggatgctcattactacgagcaggatgagcagccaacaggaacttgtgctgcatgcatcactggtgacaacaggtccctcatagctaatcttgctgctgccaattgttataaaaaggaaaaacatcttgatctggagagaaactggatgttggtagaaaaagcaagagtttgttatatagcaggcttttttcttacagtttccccagagtcagtattaaaggtggctcaccatgcttctgaaaacaacaggattttcactttgaatctatctgcaccgtttattagccagttctacaaggaatcattgatgaaagttatgccttatgttgatatactttttggaaatgagacagaagctgccacttttgctagagagcaaggctttgagactaaagacattaaagagatagccaaaaagacacaagccctgccaaagatgaactcaaagaggcagcgaatcgtgatcttcacccaagggagagatgacactataatggctacagaaagtgaagtcactgcttttgctgtcttggatcaagaccagagagaaattattgataccaatggagctggagatgcatttgttggaggttttctgtctcaactggtctctgacaagccactgactgaatgtatccgtgctggccactatgcagcaagcatcataattagacggactggctgcacctttcctgagaagccagacttccactga

SEQ ID NO: 488 - DNA, 816 bp, Homo sapiens
gatttgtaaaccccggagcgaggttctgcttacccgaggccgctgctgtgcggagacccccgggtgaagccaccgtcatcatgtctgaccaggaggcaaaaccttcaactgaggacttgggggataagaaggaaggtgaatatattaaactcaaagtcattggacaggatagcagtgagattcacttcaaagtgaaaatgacaacacatctcaagaaactcaaagaatcatactgtcaaagacagggtgttccaatgaattcactcaggtttctctttgagggtcagagaattgctgataatcatactccaaaagaactgggaatggaggaagaagatgtgattgaagtttatcaggaacaaacggggggtcattcaacagtttagatattctttttattttttttcttttccctcaatccttttttatttttaaaaatagttcttttgtaatgtggtgttcaaaacggaattgaaaactggcaccccatctctttgaaacatctggtaatttgaattctagtgctcattattcattattgtttgttttcattgtgctgatttttggtgatcaagcctcagtccccttcatattaccctctcctttttaaaaattacgtgtgcacagagaggtcacctttttcaggacattgcattttcaggcttgtggtgataaataagatcgaccaatgcaagtgttcataatgactttccaattggccctgatgttctagcatgtgattacttcactccctggactgtgactttcagtgggagatggaattttttccagaaaaactgaactgtggaaaaatga

SEQ ID NO: 489 - DNA, 1223 bp, Homo sapiens
gaagtgacgcgaggcgtagcggaagttactgcagcggcggtgttgtgctgtggggaagggagaaggatttgtaaaccccggagcgaggttctgcttacccgaggccgctgctgtgcggagacccccgggtgaagccaccgtcatcatgtctgaccaggaggcaaaaccttcaactgaggacttgggggataagaaggaaggtgaatatattaaactcaaagtcattggacaggatagcagtgagattcacttcaaagtgaaaatgacaacacatctcaagaaactcaaagaatcatactgtcaaagacagggtgttccaatgaattcactcaggtttctctttgagggtcagagaattgctgataatcatactccaaaagaactgggaatggaggaagaagatgtgattgaagtttatcaggaacaaacggggggtcattcaacagtttagatattctttttattttttttcttttccctcaatccttttttatttttaaaaatagttcttttgtaatgtggtgttcaaaacggaattgaaaactggcaccccatctctttgaaacatctggtaatttgaattctagtgctcattattcattattgtttgttttcattgtgctgatttttggtgatcaagcctcagtccccttcatattaccctctcctttttaaaaattacgtgtgcacagagaggtcacctttttcaggacattgcattttcaggcttgtggtgataaataagatcgaccaatgcaagtgttcataatgactttccaattggccctgatgttctagcatgtgattacttcactcctgggactgtgactttcagtgggagatggaagtttttcagagaactgaactgtggaaaaatgacctttccttaacttgaagctacttttaaaatttgagggtctggaccaaaagaagaggaatatcaggttgaagtcaagatgacagataaggtgagagtaatgactaactccaaagatggcttcactgaagaaaaggcattttaagattttttaaaaatcttgtcagaagatcccagaaaagttctaattttcattagcaattaataaagctatacatgcagaaatgaatacaacagaacactgctctttttgattttatttgtactttttggcctgggatatgggttttaaatggacattgtctgtaccagcttcattaaaataaacaatatttgtaaaaatcat

SEQ ID NO: 490 - DNA, 10452 bp, Homo sapiens
ctcggcccaacaaaatggcggcggcagcggtgtcgctttgtttccgcggctcctgcggcggtggcagtggtagcggcctttgagctgtggggaggttccagcagcagctacagtgacgactaagactccagtgcatttctatcgtaaccgggcgcgggggagcgcagatcggcgcccagcaatcacagaagccgacaaggcgttcaagcgaaaacatgaccgctgagcccatgagtgaaagcaagttgaatacattggtgcagaagcttcatgacttccttgcacactcatcagaagaatctgaagaaacaagttctcctccacgacttgcaatgaatcaaaacacagataaaatcagtggttctggaagtaactctgatatgatggaaaacagcaaggaagagggaactagctcttcagaaaaatccaagtcttcaggatcgtcacgatcaaagaggaaaccttcaattgtaacaaagtatgtagaatcagatgatgaaaaacctttggatgatgaaactgtaaatgaagatgcgtctaatgaaaattcagaaaatgatattactatgcagagcttgccaaaaggtacagtgattgtacagccagagccagtgctgaatgaagacaaagatgattttaaagggcctgaatttagaagcagaagtaaaatgaaaactgaaaatctcaaaaaacgcggagtgctgtggtgatatccttatatttgattccttgtgcacatgtgggagaaaatctccaaagaattacctagttttgcttaattcttgagcgatgtatgcaccaaagcacatagaagatacttaaagatgggcttcatgggattgtgagctgcactgcttgtggacaacaggtcaatcattttcaaaaagattccatttatagacacccttcattgcaagttcttatttgtaagaattgctttaagtattacatgagtgatgatattagccgtgactcagatggaatggatgaacaatgtaggtggtgtgcggaaggtggaaacttgatttgttgtgacttttgccataatgctttctgcaagaaatgcattctacgcaaccttggtcgaaaggagttgtccacaataatggatgaaaacaaccaatggtattgctacatttgtcacccagagcctttgttggacttggtcactgcatgtaacagcgtatttgagaatttagaacagttgttgcagcaaaataagaagaagataaaagttgacagtgaaaagagtaataaagtatatgaacatacatccagattttctccaaagaagactagttcaaattgtaatggagaagaaaagaaattagatgattcctgttctggctctgtaacctactcttattccgcactaattgtgcccaaagagatgattaagaaggcaaaaaaactgattgagaccacagccaacatgaactccagttatgttaaatttttaaagcaggcaacagataattcagaaatcagttctgctacaaaattacgtcagcttaaggcttttaagtctgtgttggctgatattaagaaggctcatcttgcattggaagaagacttaaattccgagtttcgagcgatggatgctgtaaacaaagagaaaaataccaaagagcataaagtcatagatgctaagtttgaaacaaaagcacgaaaaggagaaaaaccttgtgctttggaaaagaaggatatttcaaagtcagaagctaaactttcaagaaaacaggtagatagtgagcacatgcatcagaatgttccaacagaggaacaaagaacaaataaaagtaccggtggtgaacataagaaatctgatagaaaagaagaacctcaatatgaacctgccaacacttctgaagatttagacatggatattgtgtctgttccttcctcagttccagaagacatttttgagaatcttgagactgctatggaagttcagagttcagttgatcatcaaggggatggcagcagtggaactgaacaagaagtggagagttcatctgtaaaattaaatatttcttcaaaagacaacagaggaggtattaaatcaaaaactacagctaaagtaacaaaagaattatatgttaaactcactcctgtttccctttctaattccccaattaaaggtgctgattgtcaggaagttccacaagataaagatggctataaaagttgtggtctgaaccccaagttagagaaatgtggacttggacaggaaaacagtgataatgagcatttggttgaaaatgaagtttcattacttttagaggaatctgatcttcgaagatccccacgtgtaaagactacacccttgaggcgaccgacagaaactaaccctgtaacatctaattcagatgaagaatgtaatgaaacagttaaggagaaacaaaaactatcagttccagtgagaaaaaaggataagcgtaattcttctgacagtgctatagataatcctaagcctaataaattgccaaaatctaagcaatcagagactgtggatcaaaattcagattctgatgaaatgctagcaatcctcaaagaggtgagcaggatgagtcacagttcttcttcagatactgatattaatgaaattcatacaaaccataagactttgtatgatttaaagactcaggcggggaaagatgataaaggaaaaaggaaacgaaaaagttctacatctggctcagattttgatactaaaaagggcaaatcagctaagagctctataatttctaaaaagaaacgacaaacccagtctgagtcttctaattatgactcagaattagaaaaagagataaagagcatgagtaaaattggtgctgccagaaccaccaaaaaaagaattccaaatacaaaagattttgactcttctgaagatgagaaacacagcaaaaaaggaatggataatcaagggcacaaaaatttgaagacctcacaagaaggatcatctgatgatgctgaaagaaaacaagagagagagactttctcttcagcagaaggcacagttgataaagacacgaccatcatggaattaagagatcgacttcctaagaagcagcaagcaagtgcttccactgatggtgtcgataagctttctgggaaagagcagagttttacttctttggaagttagaaaagttgctgaaactaaagaaaagagcaagcatctcaaaaccaaaacatgtaaaaaagtacaggatggcttatctgatattgcagagaaattcctaaagaaagaccagagcgatgaaacttctgaagatgataaaaagcagagcaaaaagggaactgaagaaaaaaagaaaccttcagactttaagaaaaaagtaattaaaatggaacaacagtatgaatcttcatctgatggcactgaaaagttacctgagcgagaagaaatttgtcattttcctaagggcataaaacaaattaagaatggaacaactgatggagaaaagaaaagtaaaaaaataagagataaaacttctaaaaagaaggatgaattatctgattatgctgagaagtcaacagggaaaggagatagttgtgactcttcagaggataaaaagagtaagaatggagcatatggtagagagaagaaaaggtgcaagttgcttggaaagagttcaaggaagagacaagattgttcatcatctgatactgagaaatattccatgaaagaagatggttgtaactcttctgataagagactgaaaagaatagaattgagggaaagaagaaatttaagttcaaagagaaatactaaggaaatacaaagtggctcatcatcatctgatgctgaggaaagttctgaagataataaaaagaagaagcaaagaacttcatctaaaaagaaggcagtcattgtcaaggagaaaaagagaaactccctaagaacaagcactaaaaggaagcaagctgacattacatcctcatcttcttctgatatagaagatgatgatcagaattctataggtgagggaagcagcgatgaacagaaaattaagcctgtgactgaaaatttagtgctgtcttcacatactggattttgccaatcttcaggagatgaagccttatctaaatcagtgcctgtcacagtggatgatgatgatgacgacaatgatcctgagaatagaattgccaagaagatgcttttagaagaaattaaagccaatctttcctctgatgaggatggatcttcagatgatgagccagaagaagggaaaaaaagaactggaaaacaaaatgaagaaaacccaggagatgaggaagcaaaaaatcaagtcaattctgaatcagattcagattctgaagaatctaagaagccaagatacagacataggcttttgcggcacaaattgactgtgagtgacggagaatctggagaagaaaaaaagacaaagcctaaagagcataaagaagtcaaaggcagaaacagaagaaaggtgagcagtgaagattcagaagattctgattttcaggaatcaggagttagtgaagaagttagtgaatccgaagatgaacagcggcccagaacaaggtctgcaaagaaagcagagttggaagaaaatcagcggagctataaacagaaaaagaaaaggcgacgtattaaggttcaagaagattcatccagtgaaaacaagagtaattctgaggaagaagaggaggaaaaagaagaggaggaggaagaggaggaggaggaggaagaggaggaggaagatgaaaatgatgattccaagtctcctggaaaaggcagaaagaaaattcggaagattcttaaagatgataaactgagaacagaaacacaaaatgctcttaaggaagaggaagagagacgaaaacgtattgctgagagggagcgtgagcgagaaaaattgagagaggtgatagaaattgaagatgcttcacccaccaagtgtccaataacaaccaagttggttttagatgaagatgaagaaaccaaagaacctttagtgcaggttcatagaaatatggttatcaaattgaaaccccatcaagtagatggtgttcagtttatgtgggattgctgctgtgagtctgtgaaaaaaacaaagaaatctccaggttcaggatgcattcttgcccactgtatgggccttggtaagactttacaggtggtaagttttcttcatacagttcttttgtgtgacaaactggatttcagcacggcgttagtggtttgtcctcttaatactgctttgaattggatgaatgaatttgagaagtggcaagagggattaaaagatgatgagaagcttgaggtttctgaattagcaactgtgaaacgtcctcaggagagaagctacatgctgcagaggtggcaagaagatggtggtgttatgatcataggctatgagatgtatagaaatcttgctcaaggaaggaatgtgaagagtcggaaacttaaagaaatatttaacaaagctttggttgatccaggccctgattttgttgtttgtgatgaaggccatattctaaaaaatgaagcatctgctgtttctaaagctatgaattctatacgatcaaggaggaggattattttaacaggaacaccacttcaaaataacctaattgagtatcattgtatggttaattttatcaaggaaaatttacttggatccattaaggagttcaggaatagatttataaatccaattcaaaatggtcagtgtgcagattctaccatggtagatgtcagagtgatgaaaaaacgtgctcacattctctatgagatgttagctggatgtgttcagaggaaagattatacagcattaacaaaattcttgcctccaaaacacgaatatgtgttagctgtgagaatgacttctattcagtgcaagctctatcagtactacttagatcacttaacaggtgtgggcaataatagtgaaggtggaagaggaaaggcaggtgcaaagcttttccaagattttcagatgttaagtagaatatggactcatccttggtgtttgcagctagactacattagcaaagaaaataagggttattttgatgaagacagtatggatgaatttatagcctcagattctgatgaaacctccatgagtttaagctccgatgattatacaaaaaagaagaaaaaagggaaaaaggggaaaaaagatagtagctcaagtggaagtggcagtgacaatgatgttgaagtgattaaggtctggaattcaagatctcggggaggtggtgaaggaaatgtggatgaaacaggaaacaatccttctgtttctttaaaactggaagaaagtaaagctacttcttcttctaatccaagcagcccagctccagactggtacaaagattttgttacagatgctgatgctgaggttttagagcattctgggaaaatggtacttctctttgaaattcttcgaatggcagaggaaattggggataaagtccttgttttcagccagtccctcatatctctggacttgattgaagattttcttgaattagctagtagggagaagacagaagataaagataaaccccttatttataaaggtgaggggaagtggcttcgaaacattgactattaccgtttagatggttccactactgcacagtcaaggaagaagtgggctgaagaatttaatgatgaaactaatgtgagaggacgattatttatcatttctactaaagcaggatctctaggaattaatctggtagctgctaatcgagtaattatattcgacgcttcttggaatccatcttatgacatccagagtatattcagagtttatcgctttggacaaactaagcctgtttatgtatataggttcttagctcagggaaccatggaagataagatttatgatcggcaagtaactaagcagtcactgtcttttcgagttgttgatcagcagcaggtggagcgtcattttactatgaatgagcttactgaactttatacttttgagccagacttattagatgaccctaattcagaaaagaagaagaagagggatactcccatgctgccaaaggataccatacttgcagagctccttcagatacataaagaacacattgtaggataccatgaacatgattctcttttggaccacaaagaagaagaagagttgactgaagaagaaagaaaagcagcttgggctgagtatgaagcagagaagaagggactgaccatgcgtttcaacataccaactgggaccaatttaccccctgtcagtttcaactctcaaactccttatattcctttcaatttgggagccctgtcagcaatgagtaatcaacagctggaggacctcattaatcaaggaagagaaaaagttgtagaagcaacaaacagtgtgacagcagtgaggattcaacctcttgaggatataatttcagctgtatggaaggagaacatgaatctctcagaggcccaagtacaggcgttagcattaagtagacaagccagccaggagcttgatgttaaacgaagagaagcaatctacaatgatgtattgacaaaacaacagatgttaatcagctgtgttcagcgaatacttatgaacagaaggctccagcagcagtacaatcagcagcaacagcaacaaatgacttatcaacaagcaacactgggtcacctcatgatgccaaagcccccaaatttgatcatgaatccttctaactaccagcagattgatatgagaggaatgtatcagccagtggctggtggtatgcagccaccaccattacagcgtgcaccacccccaatgagaagcaaaaatccaggaccttcccaagggaaatcaatgtgattttgcactaaaagcttaatggattgttaaaatcatagaaagatcttttatttctttaggaatcaatgacttaacagaactcaactgtataaatagtttggtccccttaaatgccaatcttccatattagttttacttttttttttttttaaatagggcataccatttcttcctgacatttgtcagtgatgttgcctagaatcttcttacacacgctgagtacagaagatatttcaaattgttttcagtgaaaacaagtccttccataatagtaacaactccacagatttcctctctaaatttttatgcctgcttttagcaaccataaaattgtcataaaattaataaatttaggaaagaataaagatttatatattcattctttacatataaaaacacacagctgagttcttagagttgattcctcaagttatgaaatacttttgtacttaatccatttcttgattaaagtgattgaaatggttttaatgttcttttgactgaagtctgaaactgggctcctgctttattgtctctgtgactgaaagttagaaactgagggttatctttgacacagaattgtgtgcaatattcttaaatactactgctctaaaagttggagaagtcttgcagttatcttagcattgtataaacagccttaagtatagcctaagaagagaattcctttttcttctttagtccttctgccattttttattttcagttatatgtgctgaaataattactggtaaaatttcagggttgtggattatcttccacacatgaattttctctctcctggcacgaatataaagcacatctcttaactgcatggtgccagtgctaatgcttcatcctgttgctggcagtgggatgtggacttagaaaatcaagttctagcattttagtaggttaacactgaagttgtggttgttaggttcacaccctgttttataaacaacatcaaaatggcagaaccattgctgactttaggttcacatgaggaatgtacttttaacaattcccagtactatcagtattgtgaaataattcctctgaaagataagaatcactggcttctatgcgcttcttttctctcatcatcatgttcttttaccccagtttccttacatttttttaaattgtttcagagtttgttttttttttagtttagattgtgaggcaattattaaatcaaaattaattcatccaatacccctttactagaagttttactagaaaatgtattacattttattttttcttaatccagttctgcaaaaatgacctataaatttattcatgtacaattttggttacttgaattgttaaagaaaacattgtttttgactatgggagtcaactcaacatggcagaaccatttttgagatgatgatacaacaggtagtgaaacagcttaagaattccaaaaaaaaaaaaaaaaaaaaaaaaaaagaaaactgggtttgggctttgctttaggtatcactggattagaatgagtttaacattagctaaaactgctttgagttgtttggatgattaagagattgccatttttatcttggaagaactagtggtaaaacatccaagagcactaggattgtgatacagaatttgtgaggtttggtggatccacgcccctctcccccactttcccatgatgaaatatcactaataaatcctgtatatttagatattatgctagccatgtaatcagatttatttaattgggtggggcaggtgtgtatttactttagaaaaaatgaaaaagacaagatttatgagaaatatttgaaggcagtacactctggccaactgttaccagttggtatttctacaagttcagaatattttaaacctgatttactagacctgggaattttcaacatggtctaattatttactcaaagacatagatgtgaaatttaggcaaccttctaaatcttttcaccatggatgaaactataacttaaagataatacttagaagggttaattggaaatcagagtttgaaataaaacttggaccactttgtatacactcttctcacttgacattttagctatataatatgtactttgagtataacatcaagctttaacaaatatttaaagacaaaaaaatcacgtcagtaaaatactaaaaggctcatttttatatttgttttagatgttttaaatagttgcaatggattaaaaatgatgatttaaaatgttgcttgtaatacagttttgcctgctaaattctccacattttgtaacctgttttatttctttgggtgtaaagcgtttttgcttagtattgtgatattgtatatgttttgtcccagttgtatagtaatgtttcagtccatcatccagctttggctgctgaaatcatacagctgtgaagacttgcctttgtttctgttagactgcttttcagttctgtattgagtatcttaagtactgtagaaaagatgtcacttcttcctttaaggctgttttgtaatatatataaggactggaattgtgtttttaaagaaaagcattcaagtatgacaatatactatctgtgttttcaccattcaaagtgctgtttagtagttgaaacttaaactatttaatgtcatttaataaagtgaccaaaatgtg

SEQ ID NO: 491 - DNA, 695 bp, Homo sapiens; identical to SEQ ID NO: 141

SEQ ID NO: 492 - DNA, 248 bp, Homo sapiens
atttctccctgcagtgaattttgaagattgcaccggtcgacaaaggacagcctatttttccctcgacacccgattcaaagtgggcacagatggtgtgattacagtcaaaaggcctctacggtttcataacccacagatccatttcttggtctacgcctgggactccacctacagaaagttttccaccaaagtcacgctgaatacagtggggcaccaccaccgccccccgccccatcaggtatgttggc

SEQ ID NO: 493 - DNA, 10708 bp, Homo sapiens
  misc_feature (1)...(10708): n=a,t,g or c
gatcaccatcaccgagaccacctcacacagtactcccagctacactacctcaatcaccaccaccgagaccccctcacacagtactcccagctacactacctcaatcaccaccaccgagaccccatcacacagtactcccagcttcacttcttcaatcaccaccaccgagaccacatcccacagtactcccagcttcacttcttcaatcaggaccaccgagaccacatcctacagtactcccagcttcacttcttcaaataccatcactgagaccacctcacacagtactcccagctacattacctcaatcaccaccaccgagaccccctcaagcagtactcccagcttcagttcttcgatcaccaccactgagaccacatcccacagtactcccggcttcacttcttcaatcaccaccactgagactacatcccacagtactcccagcttcacttcttcgatcaccaccactgagaccacctcacatgatactcccagcttcacttcttcaatcaccaccagtgagaccccctcacacagtactcccagctccacttctttaatcaccaccaccaagaccacctcacacagtactcccagcttcacttcttcgatcaccaccaccgagaccacctcacacagtgctcgcagcttcacttcttcgatcaccaccaccgagaccacctcacacaatactcggagcttcacttcttcgatcaccaccaccgagaccaactctcacagtactaccagcttcacttcttcgatcaccaccaccgagaccacctcacacagtactcccagcttcagttcttcaatcaccaccactgagacccccttacacagtactcctggcctcacttcgtgggtcaccaccaccaagaccacctcacacattactcctggcctcacttcttcaatcaccaccactgagactacctcacacagtactcccggcttcacttcttcaatcaccaccactgagaccacctcagagagtactcccagcctcagttcttcaaccatctactccacagtcagcacatccacaactgccatcacctcacattttactacctcagagactgcggtgactcccacacctgtaaccccatcttctctgagtacagacatcccgaccacaagcctacgaactctcaccccttcgtctgtgggcaccagcacttcattgactacaaccacagactttccctctatacccactgatatcagtaccttaccaactcgaacacacatcatttcatcttctccctccatccaaagtacagaaacctcatcccttgtgggcaccacctctcccaccatgtccactgtgagaatgaccctcagaattactgagaacaccccaatcagttcctttagcacaagtattgttgttatacctgaaaccccaacacagacccctcctgtactgacgtcagccactgggacccaaacatctcctgcacctactactgtcacctttggaagtacggattcctccacgtccactcttcatactcttactccatcaacagccttgagcacgatcgtgtcaacatcacaggttcctattcctagcacacattcctccacccttcaaacaactccttctactccctcattgcaaacttcactcacatctacaagtgagttcactacagaatctttcactaggggaagtacgtctacaaatgcaatcttgacttcttttagtaccatcatctggtcctcaacacccactattatcatgtcctcttctccatcttctgccagcataactccagtgttctccactaccattcattctgttccttcttcaccatacattttcagtacagaaaatgtgggctccgcttctatcacaggctttcctagtctctcttcctctgcaactaccagcacttcttcaaccagctcctctctgaccacagctctcactgaaataacccccttttcttatatttcccttccctccaccacaccctgtccaggaactataacaattaccatagtccctgcctctcccactgatccatgtgttgaaatggatcccagcactgaagctacttctcctcccaccaccccattaacagtctttccctttactaccgaaatggtcacctgtcctacctccatcagtatccaaactactcttactacatatatggacacttcttccatgatgccagaaagtgagtccagcatctcacccaatgcttccagttccactggcactgggactgtacccacaaacacagttttcacaagtactcgactgcccaccagtgagacctggctgagcaacagttctgtgatccccctacctcttcctggcgtctctaccatcccgctcaccatgaaaccaagcagtagcctcccgaccatcctgaggacttcaagcaagtcaacacacccatccccacccaccactaggacttcagagacaccagtggccactacccagactcctaccacccttacatcacgcaggacaactcgcatcacttctcagatgaccacacagtccacgttgaccaccactgcaggttggaccttctgcctctctgttcccctccttcctcccctgcaaaattcctgtgtcactgaggtgaggctttatcctgagcttccctttctttctgtgttttccaggcacctgtgacaatggtggcacctgggaacagggacagtgtgcttgccttccggggttttctggggaccgctgtcagctccagaccagatgccagaatgggggtcagtgggatggcctcaaatgccagtgccccagcaccttctatggttccagttgtgagtttgctgtggaacaggtggatctaggtgagttgccagagctatgccttctgcacttcctcccacagggtgtcactgactctccccagacttatccctctgtggggcctggaggcacccatgcctttttgcccggtccttccctccctgccatctctcccatgccctccgctgccctgtgtcatgctcctctccgtcctcacccttaggaggtggctgggactaccctccctcctgggcccatctcctgacttgggctgcttggagctgtatcagtttccaactgctgccgggccaacaaacacaaatctggctgctggaacaacacgacattatcatgttagaattctgtagattaaaagtctgatgtgggtgtcactgggctgaaatcaaagcgtcaccagggctgtgttgtctttcaacggctccaggaaagaatccatttttttgccctttgcagcttctggagcctcccacagcaaggctgcatctctctgtgtctttctcccatagcctcatctccctataatgaactctggcctcctcaattgcttctcccactgttaaggacccttgtgataactttgcctcctccccaaatagtctatgttaattttctcaagatcagctgattacgccgggcggggtggctcacacctgtaatcccagcagtttgggaggctgagggggtaggatcacctgaggtcaggagttggagactagcctggccaacatggtgaaactgtctctactattagttgggcatggtggcagatgcctataatcctcactattcaggaggctgaggcaggaaaatcgcttgaatccaggaggtggatattgcagtaaagcgagatttcgccactgcacactagcgtagatgacagagggagagtgagactctgtcttaaaagaaaaaaaaaaatcagctgattgtcttataatccctgcactttggaaggccgaggagggagtatcgcttgaggcgaggagttcaggaccagcctgggcaacacagcgagaccctcatctccacaaaaaattttaaaaacttacctgggcatggtggctcatgcctgtggtcccagttatttggaaggctgaggtgggagaatcacttgagcctgggagttcaaggctgcagtgagctatgatccccctattgcacttcagcctggatgacagaatgagaccctatctcaacaataaaaaaaagttaggctgattagcaatctaattcaatctgcacccttgatcctcccttgccatgtagtatagcatagtcacagttctggggattaggacatggacatcttcccactatgggggcagccaggagggaccacaggctgaccgctatctttctgcctgctttcactcatctccacacaattccttccttcctctcgctctcttctttcttttcttcttttcttttgtctctttctcttttctttttttctttctctttttctttctttctttctctttcttttctttcctttcttttcttctttccctcatcttcacacaatgctttctccctttctttctttccttctttctttctctttctttctttctctctctctctctctctctctctttctttctttctttctttctttttctctctctctctctatctttctttttcattttgttgagagacagtctcactctgtggcccaggctggagtgcagtgatgcaatctcggctcactacaacctccgcctcctgagttcaagtgattctcctgcctcagcctcctgaggcataatgcatcctggaattcctacatctgttcctgcctctgggcatcagtcctcagggatcttggaggggagcagcaggaggagcctgtgggttggggtggtggtgttggtggcttcagacaaaagcagacagagaagtgactccggacatgcatgctctgtgtagatgtagtggagaccgaggtgggcatggaagtgtctgtggatcagcagttctcgccggacctcaatgacaacacttcccaggcctacagggatttcaacaagaccttctggaatcaggtaaagggcaaagagaggggattttttttttttttgaggtgtagtctcgcactctcaccctggctggagtgcaatggtgcgatcttgggtcactgcaacctccgcctcccgggttcacatgattctcttgcctcagcctcccaagtagctgggattacaggtgcacaccatgacacctggctaatgttttgtatttttagtagagacgggttttcactatgttggccagactggtctcgaactactgactttgtgatccacctgcctcgtcctcccaaagtgttgggattacaggcgtgagccacggcacccggccggggaggggaattgaagggtcttccctggagctggggttgggcgtctgggtcccctcaggtctgcaggttcggacgtgagcccagggatccttggtgtttcagatgcagaagatttttgcagacatgcagggcttcaccttcaagggtgtggagatcctgtccctgaggtaggagacccatctggggatgcggaggcggtgttgggtgggggaaatgtgcgcacacaaaaaacccattcctttcttttgtaatcatcagattttataaagaggggtggagggggtacataaggaatcactccctgggtattttttcggatcgttttctggggccatttatctggaggaggggtggcacctctcttcttcagcacactggaaggagagaagttgcagggacatgtgggaaggtggtgcctggattgatgactttgtccccctctggctggcccctgctctactgagtgggtcagcattagaaagagagagagagaaagagagagagggagagaacgcacgtctaggggcgcccggtggatgatggcttgatgcaacaagaagagaacgtcaggccagatgtggtggctcacacttgcnatcctagcactttgggtaggctaggcgggtggatcacctgaaagcagttcaagaccaacctgggcaacatagtgagaacccatccctacaacaataaaaatagtaataataataataataataaaatgattagccaggcatggtagtgcacacctgtagtccctgatacttgggaggctgaggagaaaggatcactttagcccaggagttggaggctgcagtgagctacaatgataccactgcactccagcctgggtgacagcaagactttgtctctataaaacacacagagagaggaagtcaatcatgtcagtcattccttgtcctgccttcccaggcagaccaagtcaggaatgctggcagccccttctgaaaaggatgcacgtggcatcccaactcatgacctctgctcccttcccccttctggtgcactttgggttgcttctggaggtgcccctccaaggacccatatgttcctggctggggcactctctaaggctgtggacccctcaggaatggcagcatcgtggtggactacctggtcctgctggagatgcccttcagcccccagctggagagcgagtatgagcaggtgaagaccacgctgaaggaggggctgcagaacgccagccaggatgtgaacagctgccaggactcccagagtgagcccaggctggagggaggggccagggcctgaggtgtcaccccagcccactccagctcagccagggggccactgggctcaggtgccagccctgtggtacctctggcaggttgggagaaggggaataagtccacacacaacggtgtcaagggtggggctagggagggtctccccgtgacctcggtactgggaaagagaccccctgattgtcatggtcagcatttcccggatggctgaagacctcggattattcaggggagatgaggcaggcaacaggagtcttcgcctgtggctctctccgtctgggagagggctctcccagacggagagagccctcactgccctccctgtgcctatcctgcctcctggcgctaaccccttgaccttaaccccttgatctgccccgcccattccatctgtgcctgtgtttccgcagccctgtgttttaagcctgactccatcaaggtgaacaacaacagcaagacagagctgaccccggcaggtaagggtggggtaaagggctgagtggtctcccgcggctatgatccgggctaccagggacatttgcccattgaagcctgtgggcagggagagacctttgggggaggcaagtcatgtggcccaggcggcccttcctggcgctggttagtggcttccacctgaggacagcaggggccacgaggagagggtgagggtgctgcgggtggcctcccctcatcgaatcccagggtctaccccacagcatcccacctcggaaatggaatcctcctcgcgcatattcagaggcaccattatcaggcccctgaatagaatggatgaggttcttgtctctgtgcatccccctccccaacccccagccatctgccgccgcgccgctcccacgggctatgaagagttctacttccccttggtggaggccacccggctccgctgtgtcaccaaatgcacgtctggggtggacaacgccatcgactgtcaccagggccagtgcgttctggagacgagcggtcccacgtgtcggtaaggccccgctcaccatcggcatcagccgagcccctcccactcattctaggatgaagccctgccccatgctccgccccggctccgcgccctgggcctacagtggagcctcgtccccagagtgccgctccaagcccatccccgttgccctacagtggagccctgccctggagctctgctcctttgatggggttgagtcctgtcccctaattctgggagagaaccccgcccactcattctagggtggggccccgcctcctcgttctagggttgaaccccgccccctccttctagggtggagccctgcccacttgatctaaggtggaatcccgccccctcacctagggtagagccccggcccctcgttctagggtggattcccagccccttgtctagggtggaaccccccgctgccctaggctggagccccgccccctcacccgcccccgcggggcccaggtgcacgggtggaccccgagcccggaggtgaagagggtctgaccctgcgatctcccgcagctgctactccaccgacacgcactggttctctggcccgcgctgcgaggtggccgtccactggagggcgctggtcgggggcctgacggccggcgccgcgctgctggtgctgctgctgctggcgctgggcgtccgggcggtgcgctccggatggtggggcggccagcgccgaggccggtgagcgtgcggggggcggggccggggggcgagggcagccaaggggtcccaggcgggccggctctgtctgaccgcgcggcggccccacctaggtcctgggaccaggacaggaaatggttcgagacctgggatgaggaagtcgtgggcactttttcaaactggggtttcgaggacgacggaacaggtgagtcctgcctcctggggaagcaggcagaggctttcctgggcaccactgcgaggacagacgccctccctgccttcctcgcatttactccgtccccctctcccttccgtcccctccctctccccttctctttctccgctcctctctctctctagacaaggatacaaatttctatgtggccttggagaacgtggacaccactatgaaggtgaggggctaaagagggggaccccaaggaactctcccagcctccattccagaatccctccccgacccccaccagggcagggagggggctgggctcggatcagcagtgacctccctgtcagcccaaaccagtggctccgcgttcccgtccctcactgtgactctgacaggtgcacatcaagagacccgagatgacctcgtcctcagtgtgagccctgcggggccccttcaccaccccctccgccctgccccggacacaagggtctgcattgcgtccatttcaagaggtggccccaggacgcgggcagcccaggctcctgctgttcttgggcaagatgagactgttcccccaaatcccatccttctccttccaacttggctgaaacccacctggagacgcagttcacgtccaggttcttccactgtggaatcttgggcaagtcagtaacgagcctcagtttcctcacctgcaaaacgggtacagcattcctgtatgatacgtcacgccgttgttgtgaaaaccacatagacttggtcaattctcggtcctactctgccctcccgtctcagccctcgtgttgccattgcctctctcggatcctccaatcctcacgtccttcacctggtctctggccctggttcttattttctctcaattccctactgcctgtttcttactttgaacctggaggcagcctgcagccccatcccatctcctgccctctcctgatctaactccctgctgcatctcttgctctcattccttagacgtcctccccttttgaccccgttccttcatccatcctgcaccccagtcccccagccctaaatcctccctcctctcctcacatcctggtccctagcaaggtatagatagcctctgtgtcttaggataccccgggtgctgttccctcggtcaccctgttgcccagttccccgtttctcttgctctcattccttgtatcctttccccttttgagcccgtccattcatcggttctgcccccgactcccccagccctaaataccccagctgctgttccccccatcaccctgctgcccaattctttattctccacccctttctctcacccctggagccctgcgggtgggggcagggcatgagttccccagtccccaaggaaaggcagccccctcagtctccctcctcctcattcccttccatctccctcccctctgccttttaaacccatcccctccgattcccctcctcccccctctctccctggtgtcacctggattcctgcagtaattctgagcccttgaaatcctcagtcgccttggcggggaagattggctttggggacaggaagtcggcacatctccaggtcttcatgtgcacaatatagagtttattgtaaaaagcagcagctctctgtcggtctccttttcaccccctcagtggtctctgtttgatcagagaacagggatttccagaggtggcactgtaggaggatcctgggagcacctgtgtctcctggggacaaaggagggggtctgtgggcagcccttgggggccatgaggttcctcacagaaaacacagaggttggggggacccattttattggggagtgactctgggcaggggccccttgggctttgtcatctatgctctccccacccccaccactgccctgaccttgatactgggggcttagggagcaattagacccctggtgttggttcagggagttgggtggtccaggggctagggctgcctggtccagccaccttttgcaaggatgggtaaagctgagcctccccaaagatcttgatcccccacaaggcccccaaaccctgatagcaaactcacacagcagagcctgtctatgctggcaccgggcccttctgttcctgctgttgtgggcagtcaggcctgcctgaggagtcgagagtgatcagaaataacgtgtccccttgggtctttgggtgctggcttgggagaggcccctttgatgctttctctgggcagggatgggccatggccttttgtcacctctgtgtctggccaggggttgggggacaaggaccattaaaagtcttaaggtggtgaagtggggcccttctgcccaaggaagaagggcttggaaacttgggggacccccaggggaaaaggcccctnggacattttggg

SEQ ID NO: 494 - DNA, 1204 bp, Homo sapiens
ctctgaggagaagcagcagcaaacatttgctagtcagacaagtgacagggaatggattccaaacagcagtgtgtaaagctaaatgatggccacttcatgcctgtattgggatttggcacctatgcacctccagaggttccgagaagtaaagctttggaggtcacaaaattagcaatagaagctgggttccgccatatagattctgctcatttatacaataatgaggagcaggttggactggccatccgaagcaagattgcagatggcagtgtgaagagagaagacatattctacacttcaaagctttggtccacttttcatcgaccagagttggtccgaccagccttggaaaactcactgaaaaaagctcaattggactatgttgacctctatcttattcattctccaatgtctctaaagccaggtgaggaactttcaccaacagatgaaaatggaaaagtaatatttgacatagtggatctctgtaccacctgggaggccatggagaagtgtaaggatgcaggattggccaagtccattggggtgtcaaacttcaaccgcaggcagctggagatgatcctcaacaagccaggactcaagtacaagcctgtctgcaaccaggtagaatgtcatccgtatttcaaccggagtaaattgctagatttctgcaagtcgaaagatattgttctggttgcctatagtgctctgggatctcaacgagacaaacgatgggtggacccgaactccccggtgctcttggaggacccagtcctttgtgccttggcaaaaaagcacaagcgaaccccagccctgattgccctgcgctaccagctgcagcgtggggttgtggtcctggccaagagctacaatgagcagcgcatcagacagaacgtgcaggtttttgagttccagttgactgcagaggacatgaaagccatagatggcctagacagaaatctccactattttaacagtgatagttttgctagccaccctaattatccatattcagatgaatattaacatggagagctttgcctgatgtctaccagaagccctgtgtgtggatggtgacgcagaggacgtctctatgccggtgactggacatatcacctctacttaaatccgtcctgtttagcgacttcagtcaactacagctgagtccataggccagaaagacaataaatttttatcattttgaaat

SEQ ID NO: 495 - DNA, 1922 bp, Homo sapiens; identical to SEQ ID NO: 142

SEQ ID NO: 496 - DNA, 541 bp, Homo sapiens
tagagcagtcagaaaatgaacttcttaacatctacactagcggcagcttcctagaaatcactgcactacccgctagtaacggagtcattgccattcagagtgtgcatttttttttctctttccagttttgctggcccccctaattatccattttctgatgaatattaacatggagggcattgcatgaggtctgccagaaggccctgcgtgtggatggtgacacagaggatggctctatgctggtgactggacacatcgcctctggttaaatctctcctgcttggtgatttcagcaagctacagcaaagcccattggccagaaaggaaagacaataattttgttttttcattttgaaaaaattaaatgctctctcctaaagattcttcacctactttcgtctccataacttctatgttttctttccttctgacacactagtgcccctaaattgtgatttgcctatacgtttagggccggggttggaagatgttaacaaccatttaagattcatttctgcagtgggagtgggtggagtttcag

SEQ ID NO: 497 - DNA, 2163 bp, Homo sapiens; identical to SEQ ID NO: 144

SEQ ID NO: 498 - DNA, 2657 bp, Homo sapiens
tgggaacacaaacttgctggcgggaagagcccggaaagaaacctgtggatctcccttcgagatcatccaaagagaagaaaggtgacctcacattcgtgccccttagcagcactctgcagaaatgcctcctcagctgcaaaacggcctgaacctctcggccaaagttgtccagggaagcctggacagcctgccccaggcagtgagggagtttctcgagaataacgctgagctgtgtcagcctgatcacatccacatctgtgacggctctgaggaggagaatgggcggcttctgggccagatggaggaagagggcatcctcaggcggctgaagaagtatgacaactgctggttggctctcactgaccccagggatgtggccaggatcgaaagcaagacggttatcgtcacccaagagcaaagagacacagtgcccatccccaaaacaggcctcagccagctcggtcgctggatgtcagaggaggattttgagaaagcgttcaatgccaggttcccagggtgcatgaaaggtcgcaccatgtacgtcatcccattcagcatggggccgctgggctcacctctgtcgaagatcggcatcgagctgacggattcgccctacgtggtggccagcatgcggatcatgacgcggatgggcacgcccgtcctggaagcactgggcgatggggagtttgtcaaatgcctccattctgtggggtgccctctgcctttacaaaagcctttggtcaacaactggccctgcaacccggagctgacgctcatcgcccacctgcctgaccgcagagagatcatctcctttggcagtgggtacggcgggaactcgctgctcgggaagaagtgctttgctctcaggatggccagccggctggcagaggaggaagggtggctggcagagcacatgctgattctgggtataaccaaccctgagggtgagaagaagtacctggcggccgcatttcccagcgcctgcgggaagaccaacctggccatgatgaaccccagcctccccgggtggaaggttgagtgcgtcggggatgacattgcctggatgaagtttgacgcacaaggtcatttaagggccatcaacccagaaaatggctttttcggtgtcgctcctgggacttcagtgaagaccaaccccaatgccatcaagaccatccagaagaacacaatctttaccaatgtggccgagaccagcgacgggggcgtttactgggaaggcattgatgagccgctagcttcaggcgtcaccatcacgtcctggaagaataaggagtggagctcagaggatggggaaccttgtgcccaccccaactcgaggttctgcacccctgccagccagtgccccatcattgatgctgcctgggagtctccggaaggtgttcccattgaaggcattatctttggaggccgtagacctgctggtgtccctctagtctatgaagctctcagctggcaacatggagtctttgtgggggcggccatgagatcagaggccacagcggctgcagaacataaaggcaaaatcatcatgcatgacccctttgccatgcggcccttctttggctacaacttcggcaaatacctggcccactggcttagcatggcccagcacccagcagccaaactgcccaagatcttccatgtcaactggttccggaaggacaaggaaggcaaattcctctggccaggctttggagagaactccagggtgctggagtggatgttcaaccggatcgatggaaaagccagcaccaacgtcacgcccataggctacatccccaaggaggatgccctgaacctgaaaggcctggggcacatcaacatgatggagcttttcagcatctccaaggaattctgggacaaggaggtggaagacatcgagaagtatctggtggatcaagtcaatgccgacctcccctgtgaaatcgagagagagatccttgccttgaagcaaagaataagccagatgtaatcagggcctgagaataagccagatgtaatcagggcctgagtgctttacctttaaaatcattaaattaaaatccataaggtgcagtaggagcaagagagggcaagtgttcccaaattgacgccacctaataatcatcaccacaccgggagcagatctgaaggcacactttgatttttttaaggataagaaccacagaacactgggtagtagctaatgaaattgagaagggaaatcttagcatgcctccaaaaattcacatccaatgcatactttgttcaaatttaaggttactcaggcattgatcttttcagtgttttttcacttagctatgtggattagctagaatgcacaccaaaaagatacttgagctgtatatatatatgtgtgtgtgtgtgtgtgtgtgtgtgtgtgtgcatgtatgtgcacatgtgtctgtgtgatatttggtatgtgtatttgtatgtactgttattcaaaatatatttaatacctttggaaaatcttgggcaagatgacctactagttttccttgaaaaaaagttgctttgttattaatattgtgcttaaattatttttatacaccattgttccttacctttacataattgcaatatttcccccttactacttcttggaaaaaaattagaaaatgaagtttatagaaaag

SEQ ID NO: 499 - DNA, 1669 bp, Homo sapiens; identical to SEQ ID NO: 145

SEQ ID NO: 500 - DNA, 3231 bp, Homo sapiens
cgtgaaggcaaagagaacacgctgcaaaaggcttccaagaatcctcgacatggcaaggaggagctcgttccagtcgtgtcagataatatccctgttcacttttgccgttggagtcagtatctgcttaggattcactgcacatcgaattaagagagcagaaggatgggaggaaggtcctcctacagtgctatcagactccccctggaccaacatctccggatcttgcaagggcaggtgctttgaacttcaagaggctggacctcctgattgtcgctgtgacaacttgtgtaagagctataccagttgctgccatgactttgatgagctgtgtttgaagacagcccgtggctgggagtgtactaaggacagatgtggagaagtcagaaatgaagaaaatgcctgtcactgctcagaggactgcttggccaggggagactgctgtaccaattaccaagtggtttgcaaaggagagtcgcattgggttgatgatgactgtgaggaaataaaggccgcagaatgccctgcagggtttgttcgccctccattaatcatcttctccgtggatggcttccgtgcatcatacatgaagaaaggcagcaaagtcatgcctaatattgaaaaactaaggtcttgtggcacacactctccctacatgaggccggtgtacccaactaaaacctttcctaacttatacactttggccactgggctatatccagaatcacatggaattgttggcaattcaatgtatgatcctgtatttgatgccacttttcatctgcgagggcgagagaaatttaatcatagatggtggggaggtcaaccgctatggattacagccaccaagcaaggggtgaaagctggaacattcttttggtctgttgtcatccctcacgagcggagaatattaaccatattgcggtggctcaccctgccagatcatgagaggccttcggtctatgccttctattctgagcaacctgatttctctggacacaaatatggccctttcggccctgaggagagtagttatggctcaccttttactccggctaagagacctaagaggaaagttgcccctaagaggagacaggaaagaccagttgctcctccaaagaaaagaagaagaaaaatacataggatggatcattatgctgcggaaactcgtcaggacaaaatgacaaatcctctgagggaaatcgacaaaattgtggggcaattaatggatggactgaaacaactaaaactgcgtcggtgtgtcaacgtcatctttgtcggagaccatggaatggaagatgtcacatgtgatagaactgagttcttgagtaattacctaactaatgtggatgatattactttagtgcctggaactctaggaagaattcgatccaaatttagcaacaatgctaaatatgaccccaaagccattattgccaatctcacgtgtaaaaaaccagatcagcactttaagccttacttgaaacagcaccttcccaaacgtttgcactatgccaacaacagaagaattgaggatatccatttattggtggaacgcagatggcatgttgcaaggaaacctttggatgtttataagaaaccatcaggaaaatgctttttccagggagaccacggatttgataacaaggtcaacagcatgcagactgtttttgtaggttatggcccaacatttaagtacaagactaaagtgcctccatttgaaaacattgaactttacaatgttatgtgtgatctcctgggattgaagccagctcctaataatgggacccatggaagtttgaatcatctcctgcgcactaataccttcaggccaaccatgccagaggaagttaccagacccaattatccagggattatgtaccttcagtctgattttgacctgggctgcacttgtgatgataaggtagagccaaagaacaagttggatgaactcaacaaacggcttcatacaaaagggtctacagaagagagacacctcctctatgggcgacctgcagtgctttatcggactagatatgatatcttatatcacactgactttgaaagtggttatagtgaaatattcctaatgctactctggacatcatatactgtttccaaacaggctgaggtttccagcgttcctgaccatctgaccagttgcgtccggcctgatgtccgtgtttctccgagtttcagtcagaactgtttggcctacaaaaatgataagcagatgtcctacggattcctctttcctccttatctgagctcttcaccagaggctaaatatgatgcattccttgtaaccaatatggttccaatgtatcctgctttcaaacgggtctggaattatttccaaagggtattggtgaagaaatatgcttcggaaagaaatggagttaacgtgataagtggaccaatcttcgactatgactatgatggcttacatgacacagaagacaaaataaaacagtacgtggaaggcagttccattcctgttccaactcactactacagcatcatcaccagctgtctggatttcactcagcctgccgacaagtgtgacggccctctctctgtgtcctccttcatcctgcctcaccggcctgacaacgaggagagctgcaatagctcagaggacgaatcaaaatgggtagaagaactcatgaagatgcacacagctagggtgcgtgacattgaacatctcaccagcctggacttcttccgaaagaccagccgcagctacccagaaatcctgacactcaagacatacctgcatacatatgagagcgagatttaactttctgagcatctgcagtacagtcttatcaactggttgtatatttttatattgtttttgtatttattaatttgaaaccaggacattaaaaatgttagtattttaatcctgtaccaaatctgacatattatgcctgaatgactccactgtttttctctaatgcttgatttaggtagccttgtgttctgagtagagcttgtaataaatactgcagcttgagaaaaagtggaagcttctaaatggtgctgcagatttgatatttgcattgaggaaatattaattttccaatgcacagttgccacatttagtcctgtactgtatggaaacactgattttgtaaagttgcctttatttgctgttaactgttaactatgacagatatatttaagccttataaaccaatcttaaacataataaatcacacattcagtttt

SEQ ID NO: 501 - DNA, 1869 bp, Homo sapiens
tctccacctcccctgccactccattttatccatcaaacctctccacttgcatccacaccctcccttcatccttccctcccagcaaaccttgctcatggattctgggcctctgtgggatgccaaccccacccctcggggcaccctctctgcccccaatgccacaacaccctggctgggccgggatgaggagctggccaaggtggagatcggagtcctggccactgtcctggtgctggcgaccgggggcaacctggctgtgctgctgaccctgggccagctgggccgcaagcgctcccgcatgcacctgttcgtgctgcacttagccctgacagacctggccgtggcgctcttccaggtgctgccacagctgctgtgggacatcacctaccgcttccagggccccgacctcctgtgcagggccgtcaagtacctgcaggtgctcagcatgtttgcctccacctacatgctgctggccatgacgctggaccgctacctggctgtctgtcaccccctgcgcagcctccagcagccaggccagtccacctacctgctcatcgctgctccctggctgctggccgccatcttcagcctccctcaagtcttcattttttccctgcgggaggtgatccagggctcaggggtgctggactgctgggcagacttcggcttcccttgggggccacgggcctacctcacctggaccaccctggctatcttcgttctgccggtgaccatgctcacggcctgctacagcctcatctgccacgagatctgtaaaaacctaaaagtcaagacacaggcctggcgggtgggaggagggggctggaggacttgggacaggccctcaccttccaccttagctgccaccactcgggggctgccatctcgggtcagcagcatcaacaccatctcacgggccaagatccgaacagtgaagatgacctttgtcatcgtgctggcctacatcgcttgctgggctcccttcttcagtgtccagatgtggtccgtgtgggacaagaatgcccctgatgaagattccaccaatgtggctttcaccatctctatgcttttgggcaacctcaacagctgctgcaacccctggatctacatgggcttcaacagccacctgttaccgcggcccctgcgtcaccttgcctgctgtgggggtccccagcccaggatgcgccggcggctctccgacggcagcctctcaagccgccacaccacgctgctgacccgctccagctgcccggccaccctcagcctcagcctcagcctaaccctcagtgggaggcccaggcctgaagagtcaccaagggacttggagctggcagatggggaaggcaccgctgagaccatcatcttttagaaagactcgctggggtctggtactgcccccaggactagtggaggttctctgcccacctcaggcactggaaatgagagctgggagggtaagggttggagttagaggaggccctgtctgaagcagagccaaaaggccagaatgggtcccctaccctggtgtcacagctgcccctagtgtgagggctgcctcataagctcccaatctcagacactggcagtcagggagaatcaaactgcctgtctccctggtcctgccatattcatagggtgtccathcacacatggtgtcccagatctaggcaggcctaggatggtgctgtctaggggtccacgggtggcaggaattcagaggctggccttgtgccctggctacctgtctccattctaacctgactggcacatctcagcctaaccaggagaggggagaagtgaaaaaccgtgaggaggactctatttggatcctggatttgttgttgttgttgttgttgttgttagagagaa

SEQ ID NO: 502 - DNA, 929 bp, Homo sapiens
ggttgtccagccacaaaggtgacagcatttaacaaagcttagagaaacctccaggagactgctaccatggcagagaagcccaagctccactactccaatatacggggcagaatggagtccatccggtggctcctggctgcagctggagtagagtttgaagagaaatttataaaatctgcagaagatttggacaagttaagaaatgatggatatttgatgttccagcaagtgccaatggttgagattgatgggatgaagctggtgcagaccagagccattctcaactacattgccagcaaatacaacctctatgggaaagacataaaggagaaagccctgattgatatgtatatagaaggtatagcagatttgggtgaaatgatccttcttctgccctttactcaacctgaggaacaagatgccaagcttgccttgatccaagagaaaacaaaaaatcgctacttccctgcctttgaaaaagtcttaaagagccacggacaagactaccttgttggcaacaagctgagccgggctgacattcacctggtggaacttctctactacgtggaagagcttgactctagccttatttccagcttccctctgctgaaggccctgaaaaccagaatcagtaacctgcccacagtgaagaagtttctacagcctggcagcccaaggaagcctcccatggatgagaaatctttagaagaatcaaggaagattttcaggttttaataaaccagccatagaggtcaagaacatgcaagaccagtattctaaagttttgcaacaattaagtgctttacctaagtgttgattgtgcctgttgtgaagctaatgaactctttcaaattatatgctaattaaataatacaactcctattcacccacttagttaaaattgatttcttctcattaggatctgatgt

SEQ ID NO: 503 - DNA, 367 bp, Homo sapiens
ctccagtctcacctcggcttgcaatggaccccaactgctcctgcgaggctggtggctcctgcgcctgcgccggctcctgcaagtgcaaaaagtgcaaatgcacctcctgcaagaagagctgctgctcctgttgccccctgggctgtgccaagtgtgcccagggctgcatctgcaaaggggcgtcagagaagtgcagctgctgtgcctgatgtcgggacagccctgctgtcagatgaaaacagaatgacacgtaaaatccgaggttttttttttctacaactccgactcatttgctacattcctttttttctgtgaaatatgtgaataataattaaacacttagacttgaaaaaaaaaaaaaaaaaaa

SEQ ID NO: 504 - DNA, 567 bp, Homo sapiens
  misc_feature (1)...(567): n=a,t,g or c
tggaataatggcaacagaaagactggctaactacaccggagcatctatgcnaataccaggacaccacatatataaaccatgtcgtttccgtggctgggtggggcatcagtgatgggactgagtactggattgtccggaattcatggggtgaaccatggggcngagagaggctggctgaggatcgtgaccagcacctataaggatgggaagggcgccagatacaaccttgccatcgaggagcactgtacatttggggaccccatcgtttaaggccatgtcactagaagcgcagttttaagaaaaaggcatggtgacccatggaccagaggggatcctatggttatgtgtgccaggctggctggcaggaactggggtggctatcaatattggatggcgaggacagcgtggtactggctgcgagtgttcctgagagttgaaagtgggatgacttatgacacttgcacagcatggctctgctcacaatgatgcagtcagccacctggtgaagaagtgacctgcaacacaggnaaccgatgggacctcagtcttcttcagcagaggactttn

SEQ ID NO: 505 - DNA, 336 bp, Homo sapiens; identical to SEQ ID NO: 146

SEQ ID NO: 506 - DNA, 230 bp, Homo sapiens
ccagagtgcaagtcatgatttgcgggagggctcttgaaccacttctggctgcaccacaattctgtacttgagtatcacagtcattgtttttgagacaaacatttttataattctaatttgggttaataaagattttaaatatttcttggtttacttttgtaattatatacacaacaaatgtattaataactaccttgttaaacaccttttaatagcacaagggttttata

SEQ ID NO: 507 - DNA, 400 bp, Homo sapiens
accaatgtttattttttaataaagcaataattcaaaacaatttttttttctactcattcaaaaggtcataactcaggagtgctgtttataccagatgaatctacaaagccaagaacaggaatcaccgtatctccttcagtagacctgatactgtgagtcttctcttttctgttgacatatttgtgcaacatgctgtagtactggcccttcggattgaaagtatacagtgatgaaatttgctgccactctttcatgcttggagtgttatattcttttggatgcgagccctcaaagaaacatttaatattctcttttgccaattcagttgcatgctctgtggctttacttttaaggatctgctgctcctgttccaaatagattttccagaatttcagctgca

SEQ ID NO: 508 - DNA, 156 bp, Homo sapiens; identical to SEQ ID NO: 147

SEQ ID NO: 509 - DNA, 234 bp, Homo sapiens
ctgccgagccgcagcaaatccaactgatccccacgtcttggccattcacctctgaaacttatcctgaatctggcagcatcggtcccccctctgtcatcatcgccctgctccaagcctcacatggccacgaccacatcctctccactggcctccctgcctccagtccttccctagccctcctccacagaagccccccatcacttgcaaaataaaggccaaagccttaagtctgtc

SEQ ID NO: 510 - DNA, 437 bp, Homo sapiens
tttcattaaaaaatagtgctctttattataaattactgaaatgtttcttttctgaatataaatataaatatgtgcaaagtttgacttggattgggattttgttgagttcttcaagcatctcctaatagcctcaagggcctgagtatttgggaggagagaggactggaggtggaatctttataaaagacagagtgattgaggcagattgtaaacattattaaaaaacaagaaacaaacaaaaaaatagagaaaaaaaccaccccaacacacaactgccctgtccagcccaatacctgacacagaatactttgtgtttgtttagttgcccccccccacaaaaacaaaaacaaaaacaaaaacaaaaaactgttccaggtaattccatcgctgctacattcctgtaaattgtcactgatcagtgctatggcagagcggga

SEQ ID NO: 511 - DNA, 282 bp, Homo sapiens
tgatgggaactggtgctgagcctctgacgtcctgcccaagtgaacagctgcggcacgccctcccagcctacccctcctgcgctgccccagacctggaaggaggccgctatcagggtacactgggaacagagacccacctgagccaccctagccctcacccacctggggagtttactacctggggaccccccttgcccatgcctccagctacaaaacaattcaattgctttttttttttggtccaaaataaaacctcagctagctctgccaaaaaaaaaaaaa

SEQ ID NO: 512 - DNA, 489 bp, Homo sapiens
ttcctaacactccacccacacgcaggtttatttccatcttccaggggtggaaagagctgtccccaagacactcaagaggggtgggcacaggccccaagtgagcccaggggaggacgggccggagagggccccacgcagcacctgccctgccagcctgtctgcggcccacccaccctcccattaaagtcacgttgtctcgaagcatgggtttccaggtccttgagcatagcagtggccgcacgctgggagcagcaggcggggccctggtgaggatgccttgtaaccttgcggcttggcttcaccgcagatccactctggaatgacacggttcccaccccgccaccttccccctcaaaacactgatcgggcgacgatccgctgggccggcagctggagcccagccgtggccctgcctgagccagtccagtttgtaaaataaatagcaagcgttgccggcttctgtacctcctccctgtgcctgccggcccc

SEQ ID NO: 513 - DNA, 760 bp, Homo sapiens
gccaggagttgtgagtttccaagccccagctcactctgaccacttctctgcctgcccagcatcatgaagggccttgcagctgccctccttgtcctcgtctgcaccatggccctctgctcctgtgcacaagttggtaccaacaaagagctctgctgcctcgtctatacctcctggcagattccacaaaagttcatagttgactattctgaaaccagcccccagtgccccaagccaggtgtcatcctcctaaccaagagaggccggcagatctgtgctgaccccaataagaagtgggtccagaaatacatcagcgacctgaagctgaatgcctgaggggcctggaagctgcgagggcccagtgaacttggtgggcccaggagggaacaggagcctgagccagggcaatggccctgccaccctggaggccacctcttctaagagtcccatctgctatgcccagccacattaactaactttaatcttagtttatgcatcatatttcattttgaaattgatttctattgttgagctgcattatgaaattagtattttctctgacatctcatgacattgtctttatcatcctttcccctttcccttcaactcttcgtacattcaatgcatggatcaatcagtgtgattagctttctcagcagacattgtgccatatgtatcaaatgacaaatctttattgaatggttttgctcagcaccaccttttaatatattggcagtacttattatataaaaggtaaaccagc

SEQ ID NO: 514 - DNA, 49634 bp, Homo sapiens
ctgtgtctcctgggcttctcaggaagtccctggactggtcaggcaagttcccaggtgtcccctccaggctctgagcactagagccagagctcccaccagtcagaaaggcagagcaaacacctctcaaaggtaggaggacagcgtaacatcatcacttcctcaagttctgtgatgacgggaggcagccacaggctaactgggcaggaaggtgggcctagatctcatttcccgagggggaaaaaaaagcccaaacaggatgttttaggtgaaatctcccaattttggctgggtgcggtggcttctgcctgtaatcccagcactttgggaggctgaggcaggtggatcatgaggtcaggagtttgagatcagcctggtcaatatggtgaaaccctgtctgtactaaaaatagaaaaaattagttgaccatggtggcacgcgcctgtagtcccagttctttgggaggctgaggcaggagaatcacttgtactcaggaggcagaggttgcagtgagccgagatcacgccactgcactccagcctgggagacagagcaagactccgtctcaaaaaaaagaaaagaaagaaatctcccaatttttaaatgtcagctcattcagattgaattcagatttaaaattataccactgttggccgggcatggtggctcacgcctgtaagcactttgggagcctgaggccagcagatcactgaggtcaggagtttgagaccagcctggtcaacgtggtaagaccccatctctactaaaaatacaaaaattagccaggcgtggtggcgggcgcctgtaatcccagctatttgggaggctgaggcaggagaatcacttgaacctgggaggtggaggttgcagtgagccaagattatgccactgcattccagcctgggtgacagagcaagactccgtctcacaaaacagaaatacattaattaattaaaataaaattataccactgcctcaaccagattctgcactcaggttgagcctctgtctcataacttcagctttggaaccagacagcctgggttcaaatcatcagctctgcaatttctttgctgtgtgcctttgagcacgtggcctaacatctctgtgcctcagtttcatcatctttaaaataggaataaaaatcatatctatctgagctgggctctatggcatgtgcctatagccccagctacttgggaggctgagacagcaggaccgcttgagcccaggagttcaaaaccggacaacatcgtgatatcctttttcaagaaaaaaaaaaatcacatctacctctaagggttattgtgataattcagtgggttattatttgtaatatatagcatatttaaaccttgccactgggacaggcacagtggctcacacctgtaatcccagcactttgggaagccgagatggctcacctgaatctaggagttcaagaccagcttggtcaatatcattaagactccatctctatacaatttttttgtaataaatttatattatattaaaacacatttttttaaaacccaaaaggctcataaggtaaggtgattggccttacctcctgtcacagagcaatcacgtgggacagctctggaactcagagctctgggcatcactccagccatctctgcctgttgcaccctttcaggctgcctgggcctggctctgagattggccagggcagaggacacgcacgcccttccctggcccagtcagctgcccacctagctggggcctgggagctgactcctgctgggtcctctcttgccccagagctggagatggtcaaagcccggaaccaactggatgctgtcttgcagtgtctgctggagaagagtcacatggacaggtaggccagcgtggggtcacagggccgggcaccctggtgggttgggccctctgatcctgggtggattgggtgggaccccacaggctgacttggggaggaaggtgcttaatggggaggctgctcggtgccttccttctctggggccctggaaccctgagctgagagatctcttctgcctctagggagcgtctggatgaggaagctgggaaaacaccctcagacacccacaataagtgagtttttctgattggatttggagttgagagttcgtggttggtaacttctttccttatccaagccctgaccgctcagcccagcgctacctccatcgtggcccggaccactccacctgtacaaagaccctgtggcaggagaagcttaggtccccccgtggttgccacctagacccccatgggtatgggtgggacaaaaggcccaagaggcaagtggggttcatgtgagcatctcaggtttgataccagtatccccagggtgccctctgcagggttttgcacaggcgtttgtctgagggtcaactgtctttccccacagggactgctccatcgcagccactggcaaaaggtaaggtggcagggtcccagccagctgactagaggctcccagctcctaccccagtcctgacactccctctccctacgcgggccatctgcccgcttcccccaccagcggaggaagaagaggagggagatggatgatgggctggctgagggagggccgcagcgatccagtgagtagacagtggccctagagggtcggtaaggagccaagggcctatgcaaggatgctcacacacctcccatccccaccttcccagacacatatgtgatcaagctgttcgaccggagcgtggacttggcccagttcagcgagaacacgccactgtacccaatctgccgcgcctggatgcgcaacagcccctctgtgcgcgagcgtgaatgctctcccagctcacccctgcccccgctgcctgaggatgaggaggtgggatgggtagtgggtcccagcccagcagcctggtgccagggcagtgggtggataggctcaaaggatcctgcccctaagctagtgggatagacagacacaggtccctcacgtgaatcctggatcaggctaggcacacagatgtgcactcttaggttggggtgtggatcagagtccctagggaagacatacgtaaccacctggcctgggagacagggaacagggttaccctggacagttagatgtggacctccaagatcaggggttcccaagagccgaggggctagacaagggtccttagtacagacagaagtggccaccaggccttgaggagcaggggctgggcaggaatggatgggagtctataagccatctgacccagcggggtagacaagggtccccaggacagacatataggacccttcagacatataggactgtcagaaatggacagagcttcctaggtggcacagacgtgaccccctagacaggattccctgaggcaggcagacgcgactccctgggctgacaggtgtagatggagtctctgggctggataggagaagacaggggtccctggggcaggcacacttgacccgctggctggttgaggtgtctgcccttcatacatgcctcctgtctgagtcccttagcgagcccctcatgccatttgttgctgggaaaggcaggagggatgaatgtggattcccagcccctctgctttgactctcttgggcctggcatggggcccttgtgtccccagggctcagaggtaaccaacagcaagagtcgtgatgtgtacaagctgccgccacccacacccccggggccacccggagatgcctgcagatcccgcatcccatctccactgcagcctgagatgcagggcacccctgacgatgaggtgagtatgccaggctggcccagggttatggggcacatgcggtagggctcaggaatggccactcaacctggcctgtctgtccatgcagccctctgagcccgagccctcaccctccacactcatctatcgcaacatgcagcgctggaaacgcatccgccagaggtgagcgtcccccagcctgcttgcccctcgtagggccctttgcaactgctgagtctcccctctgcctccccaggtggaaggaggcctctcatcggaaccagcttcgttactcagaaagcatgaagatcctacgagagatgtacgaacgacagtgatgttcccaggtccccccacaccagtaaacatcccccagctccacactggtgtctgctccggtccctccttcctggcccaggcacaaagcagttggcagagctctagcacatttattgggagagtaagcctgggaaagactaagggagtggtggcagggagaaaggctgtggggaatcagagcgggtgctcagttgggtcttgaaggagaagaggaggagggtgggaggtgggttgccgaggatatctggttgaagacttgggggtcaagacaaagggacttagggggatggggtctggttagagttggggagggggcctaggacatccgtgcagagtctggggaggttggggtgggagagtctgtacagtttggtgttgggtgttctagttggcctggtgtccaagagttggggcagtcgaaaaagggttccagagtctggtgtggctggctggggtttcacggcagaaaatgggctggagggggcagttgtagactgtctggttgcaggggaaggatcgggtcttgggaaccaggcctggatggtctggagtgggaggtctgtgcagtccaggacgtttggggggtggggggattgtgcctgactggcctggggttgggggagggctgtctacaccataatttggtgtcaaaatagggaagggatggaaatgtagtacccggatgtctttgtagaggactcagaaggaagtagaggaggggtcttaagtggggctatatgccaagaaagtgggtcggtggggctgagactgtcggctgagggttagggtagtgctggtagggtctggaagccggggagttgtcggtgtggggtcggaaagctggagggggtgtgagagcgagggtgtcagtggaagggtctatgttatcaaggcagtgtccaggatggaggtcagggcagaatccaggagtgggtgagaggacagtccttggcgcactcgggacatctggctgggcggagtcagatcggctttaatagagggagcctgaggaggctcccggggtgcgggcgcggcccagccccctcctacttggctgcggctggcggtggggcctgggccgacgctggtgcggcctggatggacaggacgccctcgggggacagcgcggacgtcacggcagccggatccacgccaggcggcaggcggtagcgacggtggaactcgcgcgcgacgaatccgtgctcatcctggaggggagggaggcttgagcggccccgcccctccggcccggcggcgagcgtacccgctccagccccgccccacgccgcggctcaccgggcgctcctcgtggcgcgcgtgcacctccacgtgttcgcccaccaccttgacagcaatttcctccggcgagaagtgcttcacgtctagcagcaccgaaaagtggccggggtccgtcggcacctgagcgcagcgggcgcgggcgggactgtcattgggctgggccaggctccaggacccacccagggagaccccacccccgtcggttccgtgccgcggctcactctggcctccggagttgagcagtcagctctcctactgggagtcacccaggacctcttcaccctgaacaacagggatacgccctccccctgtaatatctgggattgccctctcccccgcagtgatgaggctcccttcccctgcaaggtcaggaacctctgccctcccccggtgtcagcgaatccgaagtcatcgtgccccccagggcactgattccccagctccctcctcagagccccgggtcccttctccgccagccccgccaaactcgccaagatgcccctttccccgtctccagggtcctctgcctactctcccactcgagtcacgggacctcggcagctactggtagccttcccccacttcagagtggccgggaacccttcctcaagtcgcagggccctctcccctcctcttctggagatatcgggccaccgcacacagtctctcaactcttccccgagactaagaacattccttcccctcaggagtcactgcccgcctccttttccccagatttcccggatcaccagcctccttcagagtaagcaagactccccttagagtgacccaggccttccattctctggagagctgagagccccccaccccgccccccacctaagagcgacggggacctcccacccgctgcagtgtgcgggcctcagattcccattgactccggaagcccttcggagctgcggactctccaccccgcccaaggccaacgaacattctctcacatgttcccaccccaggctgccccagacccctggcaatggaagtggtcgagttcacccctccccaggcctggcacctgggcgacgggcagcgccacgctgggtgcgcgcaggtagtagggggcgagcgtggtggggcagagcgcagccagctcggcctccagcagcccctcgccgaagcgctggtcaaagaggcgtccgggcgccgaaagtccgggcaacggggccgaggcgcggcgcagccaagacggctgcacaggcacagggatctccatcctgctcctccgcgttgcagtgcccctgcgtgcgcagccgctcatttatagtgcgccctgtgccggcccctcggagggctgcccagggacactgggaccgtggccagacccggccattaggagagccttatttagaaacccaaacaatgacttggccatttattaagcgcctgctggatgcctggcaaatgctgtcaagaaggtgacatgaagattccccaatttccagaagaggaaactaaggctgaggagggggagccttgcgggtgtggggagcacagcgtggtgattggggcccaggacccaagaggcccacggaagagtttccagtccctttaatccactgcctcccccctggcagctctgaggatgacgcagatggaggtctttaggagcagattcctggagaatgcggtagccccgccaggatgtcaggaggacatagaacaggccctccctacccttatcctcagccagaccttgggcccagtcccccggcaggccgggcctaattctgtgcctctgactcagcctctggtgcgcagaggccagggggcgcgagcatgaacagttcaggctggccccccgggggccgcgcgctggggctggaaatagctcattttgatcccgctacctcggccaggagcccagacctggcaactgatgcaaccagctgctcctgcagcaagaaagaagttagatgaccgttgggacggactgattggcccaactgatggaggaatagcggttagagagagggcagagcgcgccccccccccaacccgccccactgcccctgcaacagaaagaatggtagttagaccggggtcgggacaggacttctgcagcaagaaggcgcttaaaaagcgggacttttaagcgagggtactttagatcacctcctaaccgcaagcccagcctcagatccttcccattggtgcacggtcttgccaattactgctacactcggcaggttctccaatcaaacacgccctgtcgggcaggcagtcgtcccagccaatcctgaaacacctccctccgggtacttctgtttcctctctttcattggtcgccttggaggccgctcgcctccggcgcgggcacagagaggggcggggctgatagggcgttgctaagcgacggagatgcgcgcggggcctgttgggtgaaggagcagagcggccggaagcgcggagggagccgcgggatggaccgcaggtgaggccgatcgctcttccagggactacaggaggctggggaggaccaacggcgagagcagcacagcctaggacgggctggatacggtctggagtcgctagggctccaccgcactggaactacaattcccaacatgctccacagccgttggcctctccagccgtagccgttagcatcccgggggtcccctaagagtcttatgttcctctctgagtgggccccaaggaattattgcctctaaaggtgtccaagaaaggcttgagatctgaatttcttcattttgaaatggcccccagacacgcctgggcgttgtctttgaactttctcgcggaggcggagcccagtggatcctggggcttgtagtccatctaccctttgccttcgtgtcccccaggaatgtatgggaaatgctcggtgatataatccagccgcggttctttctttctttctttttttttaagacagagtctctcgctctgttggcccagactggagtgcagtggcacaatcttggctactgcaacctctgcccccgggttaaagcaattctcatgcctcagcctcccaggtagctgggactacaggcacctgccaccgcgcctggctaattttttatatttttagtagagacggggtttcgccatgttagtaaggctggtctcgaacacctgacctcaagtgatccacccgcctcggtgtaatcccaaagtgctgggattacaggcgtgagccaccacgcccggcgagccgcgattcttaacctgaactccacttcgcaatcacctgggacgctgcggaaaagacacggaggcccagccccactaatagatattctgattctgttggtctggaatgggaaccgcgcgcctgtaacgttgaaaagcccctcctagactggatccagggttgagaaccaccggctgtcagttcctgagttgctccctgttaagactgctccaggggcgggctcccaggactcacccttccactgtcgatatcctgaatgtgcaacggtgcttcatggaaatgacagtccgtctcctccaggaatctatgggaattgtctggttctgccctcctctaatgtccccctccccagggctgcggcgaaaccacgtgctgcctgaaccccactttcctcttgcagcctgccagttttctccattcaagatagtccctttggagatgcgcccctgggtcgaagccactactggccatcccagagccagacctggtgtcccaaggtgaggacacccctcaaagagtgctgagtgccagcccagtagcaagagaatgacctttagagggtaggaagacatgtgatgagagatagggatgagagatttaagagacagccccttgtcccctccccacggccctgcccttgtccccctctctaccacctggattccccatctgagcccccatcacactaggttgttatcattacaggatgtgtttcctcccctctggactgagactttgtgtgtgtcctggttcccctgcagggatgacccatgagacctcacactttttcttcttgtgctcttccctgatcttagaccctgagcccatccaggtctcagagatccaggctcccacaagctcccaaggctctagccacaggtcccaactcccctgagctgtttgaggagtcctggccatccagttcagggaccccctccctgcccagcaccactgagggacagatgtgggcctccccagcacccaccctgattgacagcggggactccgtggtggccaagtaagtaccagcagccctgggggaaaaagaggctttgggttagagggagggagaaggcatgcagtaataatcatcatggccagagctgtttctgcagcactcttttaggaccaggcagtttatgtgtgttaagaactctggtgctagactgcctgagttcaaatcccagctctgtcatttaactctctgtatgatcttggcctcagtttctttatctctttttatttatttatttatttgtttagagacagggtctcgctctgttactcaggctggaggtcagtggtacaatcacagctcactataacctcaaactcctgggctcaagccgtcctcccacctcagcctcctgagttgctgggattacgatgcatgccaccacacccagcaaacctcccaccttggcctccaaaaagtgctgtgattacaggccagacgtaccatgcccagcctcagtttatttatctctaaattgggtgttttgttttgttttgtttttgtttttgtttttttgatggagtttcactcttgttgcccaagttggaatgcagtggcatgatctcggcttactgcaacctctcccttctgggttcaagtgattctcctgcctcagcctcccaagtagctgggattacaggtgcccaccaccacacctggttaattttgtgtatttttagtagagatggggtttcaccatgttggccaggctggtctcaaactcctgacctcaggtgatccacctgcctcagcctcccaaagttctgggattacaggtgtgagccactgccaggcctaaattgggcatattaatagtacacatcccctagggctgttttgagctttcagtgagttactatatataatgatctctagcagtgcttctcacatagtcaccacttagatttgtagaatacaggttcagctgctgtaacaaagagtcccaaattaattatggctgaaacaagatagaatttattcctccctcacctgcagtccaggcagaagccaccagggatgatgtggcaacccgtagttgaggtgtcagggacacaggttacttctgtcttgttgctgtccgaactctaggccgttgccctttccttcatggtgcaaaatggctttcaaccacatcagctttccaaaatcacatttcataccctgtttgtcaagaacttagtcacgtggtcacaaggctacaagggtacctggtaaatatagtccataggagactggctgtgtgcccagctaaaagttacattcctggctgggcacagtgactcattcctgtaatcccagcactttgggaagccaaagtggcaggatcccttaagcccaggagttcctgaccagcctgggcaacatggcaagaccccgtttctactaaaaatacaaaaattggcagggctgcagtggctcacgcctgtaattccagcactttgggaggccaaagtgggtggatcacctgagatcaggagtttgagaccagcctgaccaacatggtgaaactccgtctctaccaaattagccgggcgtggtggtgcatgcctgtaatcccagtgacttgggaggctgaggcagaagaatcacttgaaccaggaggcagaggttgcagtgagccaagatcacgccattgcactctaacctgggcaacaagagcaaaactccgtctcaaaaaataaactaattaattacaaataaataaataaataaaaatacaaaaagtagccgagtgtggtggcatgcacctgtgtcccagctacccaggaggctgaggagagaggatttcttgagcccaggagttgggggctgcagtgagctatgattgcaccactgccctccagcctgggtgacagagcgagaccctgtctcaaaaacagttatgtgactatataagaaagaaaagcagatattgagggatagctaccaggctctgccatggtgcttggtaaacgttggctgctataattattcttattattatttggctctcctcactccactcacctcctatcccctgatgttcacaggtatataaacaggttccgccaggctcagcccaccagtcgagaggagcgccagcctgcaggcccaaccccagctgacttttggtggctgcagtctgactctccagaccccagcagtcaaagtgcagcaggtacctctttcagtgccatccactactcccacccctaaacctttgctgatcaatgcccccagcagccactcctcctggccctcatacctcaactggggcttctcagcaggagccaacaaaccagaaggaagaccccatacagctgtccctactgcggtcaacgtgaccagtgcatcccatgctgtggctccccttcaggaaataaagcaggtgacatccccattcactccctcccttgggtgcctgaactgacaacaccagccctaggacagaattagaagatcaggagcagtggctcacacctgtaatcccagcactttgggaggccaaggtgagaggactgcttgaggccaggagttcaagaccagcttgggtgacatggtgagattctgcctctactaaaaaaaaaaaaaaaaagagagagagagagagaaccaggtgtggtggtatgtacctgtaatcccagctacttgagagcctgaggctggaggatggcttgagcctaggagttcaaggctgctgtgagctatgatcatgccactgcactccagcctgggcagtagagcaagaccctgtctctatttaaaaaaaaaaaaaaaaaaaaagcctgggcaccgtggctcatgcctataatcccagcactttggtaggctgaggcaggcagatcacgaggtcaggagttcaggaccagcctgaccaacatggtgaaaccccgtctctactaaaaatacaaaaattagccgggcgtggtggtacacacctgtaatcccagctactcaggagcctgaggcaggagaattgcttgaacccgggagacggaggttgcagtgagccaagatagcgccagcgcactccagcctggcgacagcaagactccatctcaaaaaaaaaaaaaaaagaattagagctgatccccatttcaaggaagctaaaacagaaaaggaggatttgctggctaatgtaattgagaaatccaaaagtagatgtttccagatatgcctggatccaggtgtttgaataatgttgggagagacccaactctctctgggctccatgcccccccttttttttttgatacagagtcttgctctgtcacccaggctggggtacagtggcgccatctcagctcactgcaacctccgcctctcggggtcaagcaattcttctgcctcagcctcctgagtagctgggactacaggtgcatgccaccacacccagctaatttttttgtatttttttagtagagatgggatttcaccgtgttgcccaggcttgtctcgaactcctgacctccggcaatccgcccacctcagcctcccaaagtgctaggattataggcgtgaaccaccaagcccggccttttttttttttttttgagacggagtcttgtgctgtcatccaggctggagtgcagtggcgcgatctcggctcactgcaaaccccgcctcccaggttcacgccattctcctgcctcagcctcccgagtagctgggactacaggtgcctgccaccacgcccggctaatttttttttgtatttttagtagagatggggtttcaccatgttagccaggatggtctccatctcctgaccttgtgatccacccacctcggcctcccaaagtgctaggattacaggcatgagccaccgcgcccggccttctttttttttttttttaattagatagggtcttactcttaggctggagtgcagtggcacaatcatggctcactgcagccttgaactctttgcaaccttcgcctcctgagtacctgggactacagcatgcgccaccatgcccagctaattttttggtttttttgtagagatgggatcttactttgttgtcgaggctggtctcgaagtcctgggctcaagcaatcttcctgcctcggcctcctaaagtgctgggattgcaggcgtgagccaccacgcccgcctctgtgcttctctttttttgggctcagtcccaggcgggctttcccctcacaatagccaggatggtccttggggtctctaggctcccatggtcctggctcagtgactccagtgggaagtgggggcttttcgaattgctccatcagaagccccagggctcactgtgattcactcatccttgagccaaccactgtgaaccagaggatagaatgctctgatgaagcagctctgatctgggaggtgggatccatcctcctccaaccatgatttgtccatgaaaggtgctaatccaccgggcgcggtggctcacgcctgtaatcccagcactttaggagactgaggtgggcggatcacctgaggtcgcgagtttgagaccagcctgaccaacatggagaagccctgtctctactaaaaatacaaaattagccgagcgtggtggcgcatgcctgtaatcccaggtacttgggaggctgaggcaggagaattgcttgaacccaggagatggaggttgctgtgagccgagatcgtgccattgcactccagcctgggcaacaagtgaaattcaatctcaaaaaaaaaaagaaaaaaaaaaaggtgctaatccaaaggggaaaactgggtctctcctccctgaggaggaggagcagatcctaagctggcatgtgaggttaccaagggcagtacaacctgcattccaggccctctgtttagaacccccttcccagcagcctttgggttggggctggcgtctgaccctgtcaccctgcagaacctccacacatggaactcatccctgctggacctggagacgctgagcctacagagcagagctgccaggctgctcaaacgcaggtgcccgcacccctgcccccatcacccttcctactgcggctccacgtggcccaggtctcgagacctccattgcctcactcctgccttctccctgcagcaaagcctccatctcctcctcctcctccctcagccccagcgatgccagcacttcctcattccccaccagctctgatggcctctctcccttctcggagaccttcatccctgactccagcaagggccttggccccagggcacccggtaagggctgagaggcaaagactgagggcagcctgggtgcaaatcccaactctgccactgaccagctatgggactttgggcctctctgggccttgtttctccagctgtaaaacagggataaggccagatgaggtgggtcaggcatggaggccgaggcgggcagattgcctgagctcaggagtttgagaccagcctggccaatgtggcgaaacccggtatctactaaaaatacaaaaattagccacgcgtggtacataatggtgcatagtggtgcatgcctgtagtcttagctactcagtaggctgaggcaggagaatcacttgaacctgggaggcggaggttgcagtgagccgagattgcgccattgcactccagcttgggcgacagagagagactccatctcaaaaataaataaataaatggtgccatcatagtccaattgctgggctcaagcaatcctataacctcagcctcctgagtagctgggactacaggcatgcaccactatgcccagctaattgtttttatttttttatttgttgagatgagggtctcactatgttgctcaggctgatctcaaactcctgggctcaagcgatccccccaccgccttcgcttcccaaagcactagggttataagaatgggccattcgttatgcccagctggttgttgcagttttgaatagggaagccagggaaggtgaccaagatctgatggatgtgagagaatgcaccgtgcgatacatgaaggaagagcattccaggcagagggaacgacaggtgtaaaaggcaaagccttcgccttttaccgggagagaggtgcagccaagggagggttcttaagtacgagaggcctggtctgactcaggtattcacaggctccctctggctgagagtagggaacagatttggaggagagtagagagaccagggaggctatttaagagtccaggttgggtgagtggggctggagcagggtgagggctgtagcgggtgggggagtgggtagattctggggaatatgtcttctggtcactgctgtaactccagtgtccagaacggctcaataaatatttgttgaatgaaaccaggcactgtgactcacgcctataatcccagcactttgggaggcccaggtgggatgatgatggcttgagcccaggagtttgagaccagcttgggcaacaaagcaagaccctgtctctacaaaaaaataaaaattacccccgtgtggtggcacacgccttttgtcccagctactcaggaggttaaggcaggaggatcgcctgagcccaggaggtcgagactgcagtgatcgcaccactgccctccagcctgggtgacagaacaagactatatatatataatgaacaaagacttgaatgatgacagatggagaagaccaggagtgctcgctcccctgactttgaccccttcccctcttcccaccccagagaggagctgggacagtatctggagagcctgtctgagtaaccccctgcacagttggagggcgtgtgtgcaggctgtcctggggttgctgatctccctggcccctgcctcaccctctcctctctacctccccctacagcatccccggcaccagcccaggcccagacccccacccctgctccagccccagcctcctcccaagcaccccttcggccagaggatgacattctgtaccagtggcggcagcggcggaagcttgaacaggctcagggaagcaagggtgacagagcttgggtgccgcctctgacccctgccctccgcacgttggtgagccgagggagggaggagcctggggggagctggaggaggggctgggtctgagggggactgaggaccctccaccctctctctctctgtctcagatctctcttatctgtctacagacctctcctgctccagtggagaccctcagttctctggggacccagcctaaccatgtcccactgtggagcagtgtggcccagcctggtccaccagaggccttctatgtggagaggcctccttttccctcagtgtcctctccacacatcttttgggcccccagctcccacgggttcttctgggccccacagtctgggccttgggtatcccttggggctgttcctcccacgcagcaggcctccaccctagcacatctgggctctaccctcgcgcccccggcttccctggcctccaccctcgaacccccggcctccaccccagctcccctggcctccacccttgcacccccagcctccaccccggctcccctggcctgtacccctgcacctccagcctccaccctcgcatccccagctgtcccccagggcctgcccatccctgacccaagcagctgtgcccagcctaagagcctggggcccaagtctcggaggagcagagcccctcgcccagaggctgccgagcaagtccctgcagctggccagggacctggccctcagctcaggggtgtcctgggccaggtagtggcagctcggctgttccctgacagcctggaggacacgcctcctcacttcgagggcccccctccacccaaggctggatctccgaaagtccaggccacacaaccccaaaccaaggtcactccccctccatctgaatcccagtgtcgggccaaggccgagtctctgaaagccaaggccttgccgcccgcagcggggtcagtgatacggaagagcgaagccactccttcccctggagcctgcctgcagcccgaggtcccactctctccagctgagcaggcaaccacagtcaaggcctcgccgccagccttccaggtggggtctccggaggccctggccccgcccccgcccgctgctgaccacgccccctcggaggccctgcttgcccagggccgccctgctgctgcaggctgcagaaggtgatgcccgcgccctcctggatgttggaggcaggccagccccctaagaggccggccccttggagctcattcttttctccccggcccagactccgacggcagcgagttccaggacgatcccgtgctgcaggtgctaagagcccatagggcagagctgagtcggcagaaaaggtgaccgaccctccatccccagagtctatgacactgggccccggagacctctgagacccggttaggcatccagccctcctcatcccctgtcccagcagtccgtccacagccccagattctaagcctgagcacataccccagcctctgctctcccggcctttctccagggaagcggatgcccgattatcgttcctgttggaccaggctgaagacctgggatcttggtcccctccagccgggtcgccccctaggtccccaaggaggctgctaagaagggaaggagattccctggaggccagaagactttgaattgtacagattctattttacccagtgaggctctttttttttttttcatacagttactggttatctgtgagaaaggggttgtttggaaaggccaaggggtcatgccaatttaaggaaatgccccccatcctccgctgccccatggctctgccctgccccccaccccttcctgaccacggaaacaagatctcctttctggttatatcttccttggggcagagggagtttcagacaagacttctggcaagactgggacccaccttatctggcttcactcaggagccctggctcaaatggaccaaaggactgccctccacggaggaagctactagggtcatcagagtgttggatgatggtcaggctatagcccacacatgcttgagcagcagcagcatctggtgcagctgacccctccctccttgaagcactttctctccctgcttccagcccttctctctgcacctctctggtcaggcctagtcactagcccagcatgtcaactttggcatgacccagggccatggcgttgacatctctatctgcacccacccataggtgctcttgtctagcttaatgactctaaaccccgtctctattctgataatcctcaaatttctgtctgtaacctagacctggccacgaaaccttgggctcctacctcattaccatttctacccaagggtttaaaagacatctcaaattccataggtcctaaatggagtttccaatctttccccctaggcgtgcctctccccagcttctttttttttttttttttggatggagtctagctctgtcacccaggctggagtgccatagtgtgatctcggctcactgcaagcttcgcctcccgggttcacgccattctcctgcctcagcctcccgagtagctgggactacaggtgcccgccaccacggtcggctaattttttttgtatttttagtagagacggggtttcactgtgttagccaggatggtcttggtctcctgacctcgtgatccacccgcctcggcctcccaaagtgctgggattgcaggcgtgagccaccgtgctgggccccccctccccaactttcttcggctctgtcctttgccgctcagaccaaaaaccttagagttgtctttgacttctgtctttcccttccacccacagttaaccaggaaatcctgccatctccgcctttattttattttattttttgagatggagtttcacccttgttgcccaggctgtagtacaatggcatgatctcggctcacggcaacctccacctcccgggttcaagcgattctcctgcctcagccttctgagtagctgggattacaggcacctgccaccacgcccagctaattttctttgtttgtttgtttgttttgagacagagtcttgctctgtcccccaggctggagggcagtggcacgatctcggctcactgcaacctctgccttgcaggttcaagctattcttctgcctcagcctccctagtagctgggactacaggcgtgtgccaccacgcctggctaatttttgtatttttagtagagacggggtttcaccatattggccaggctggtctcaaactcatgacctcgtgatcctcctgcctcagcctcccaaagcgctgggattacaggcatgagccatcatgcctggcaattttttgtatttttagtagagacgaggtttcaccatgttggccaggctggtctcgaactcctaacctcaggtgtcccacccacctcagcctcccaaagtgctaggattacagatgtgagccaccgcacctggcctccacctttaaaatctatccagaattcaactgcttctccccttctactgctcacacctcaatctaggctgtcatcacctcctctctggactgttggaaaacttaacggtttttataaacctgatattctttgacacacttgccatcaagaggcagagtctatgtcccttcatcttgaaactgggcccctcaacaaataaaatgcagaggaagtgatgcagcttaacttctaaagtgcagttagaaaagatgatttctcagctgggcatggtggctcacgcctgtaatcccagcactttgggaggctcaggtgggcagattacttgaggtcaggggttcaagaccagcctggccaacatggtgaaatgtctctactaaaaatacaaaaattggccaggcattggtggtgggtgcctgtaatcccagctactcaggaggctgaggcaagagaattgcttgaactcagaaggcagaggttgcagtggaaaaaaaaaaaaagataatttctctctctttctctctctctctgacacttgctttagaggctacattaaaaaaaaaaactagttgccatgctggggaggggtttgggttacacaggtgtatgcacttatgaaacttagtgaagtgtgtgaatttcattgtatgtaaagtttacctcaaaagaaaatattgaacgccagttaaagatacgcctgtaatctgacttctttgggaggccaaggcgggaggatcacttgaggccaggagtttgagactaccctgggcaacacagcaagacctgtctctacaaaaataaataagtaaataaatagccagatgtggtggcacacgatttgcagtcccattactaggggcggggaggggcgctgaggcaggaggtttacttgagcccaggagttcaaggctgtattgtagtgaactaagatcatgccactgcactccagcctgggctacagagctagaccctgtctttaaaaaaaagaaaagaaaaaaaaaagtatgtacactgaaatatttagggaacaataaaccaatgtcgacaatttattttgaaatgcatccagagatgagttggattgatggataaatagtgtaataggtagatgtgagataaagcaaatacagcaaagtgttcatggtaggatctaagtggcggatatgcgggtgtccactgtaaaatttttcaactttgctgtaatttagaaacttttcatggccgggcgcggtgactcatgcctgtaatcccagcactttgggaggccaaggcgggcggatcacgaggtcaggagatcgagaccatcctggctaacacggtgaaaccccgtctctactaaaaatacaaaaaattagccgggcgtggtggcgggcgcctgtagccccagctactcggaaggctgaggcaggagaatcacttgaacctgggaggcagagcttgcagtgagccgagattgcgccactgcactccagcctgggtgacagagcgagactccgtctcagaaaagaaacttttcataataaaatgatggagaatatatgattggggttgttttgatatctgcatttacaaaatggagggataagatggatttctagtaacttctgtatgtcacatggtaaatataatatttgttttcaacctttctttctttctttttttttttttttttttttgagatggagtcttgctctgtcacccaggctggagtgtagtggtgcaacctcggctcactgtaacctctgccttccaggttcaagtgattctccttcctcagctttccgagtagttgagattataggtgcatgccacctcacctggctaatttgtgtgtgtgtgtgtgtttttagtagagacagggtttcaccatgttggtctggctggtctcgaactcctgacctcatgatccacctgccccggcctcccaaagtgctgggattacaggtgtgaggcaccgcacccggcctgtttctaacctttctaagcaaaccatacatttaaatgaaatcagagtgggcacagtggcacaggcctgtaatctcagcactttgggaggccaaggcgagcagatcacttgaggtcacgagttagagaccagcctgggcaatatagtgaaactctgtctccactaaaaattagctgggcctggtggcgggtgcctgtagtcccaggtgctcaggaggctgaggcaggagaattgcttgaacatgggaggcggaggctgcagtgagttgagatggtgccactgcacttcagcctgggcaacagagtgagactccatctcaaaaacaaacaaactaacaaaaaaatgtaattgacaagaaaaatagctgtttagatataaggagaaataaaagatactatagtagcagaacctgatctagctgggtcacgggtggggtctagaagcattcctgaggaagttacacttaagctgagacaggtagaaattatctagttaacaaagggctgtcctaattactctagttggataaccgctcccaaaacttagtggcataaaacaattattttattatgctcatggattctgagagtcagaggtttggacagggctcatatggggacaatttttgtctcctccatgatgtctggggattcacctggaaagactcaaaggtgacttgatagacttgatggctgtggagtagaatcctccagaacttcttccgtggtcttctcccagtctgactgggactattgactaatgcctatacatagctccattggcctgggcttcctcaaagcatgtctgcttcagcatagtcacacttcgcatatgatgcaccatggttctacagctcattccagtggacgagaacattggtcaagaagctgcattgcctttcatcacatagccttagaaatcaccgtgtcacttccactgttttctattggttgaagctatcctagtcccacccagattcatagaaagcaatcatagagtccgcgtcttgataagaagagtgtcagagaatttgcagctgttttaaaatcactgcaggaccccattctccatgatgtgattattacacattgcatgcctgtatcaaaacatctcatgtgccccctcaatatatatacctaaatatacctgttatgtacccagaaaaattaaaaaataaaaaaaaaaatcactgcaggggttgatggggaaacactagacagaaggaatatcgtgtgggaaatccctgtgatgagagtgaggtcagcaaatttagtacataagtaactgcacattcacctctccctcagcactccctttcaccagcccttgcttaattattctccatagaatgaatcaccttctaatattttttttttttttcagacagagtcttgctctgtctcccaggctggagtgcagtggcaaaatctcggctgactgcaacctccgcctcctgggttcaagcaattctcctgtctcaggctcctgagtagctgggattacaggcacacgccaccacacctggctaattttaatatttgtatttttagtagagacggggtttcagcatattggccaggctggtctcgaactcctgaccttgtgatcctcccgcctcggcctcccaaagtgctggggttacaggcgtgagccactgtccccagctttttttttttttttttttttttttttttgagacagagtctcacttcaacacctaagctggagtgcagtggcgcgatctcggctcacagcaaactctgccacctgggttcaacccattgtcttgcctcagcctcccaggtagctgggattacaggcacgcccgccgccacacctggctaatttttgtatttttagtagagacggggtttctccatgctggccatgctggtgtcgaactcctgacctcaagtgatctgcccgcctcggcctcccaaagtgttgggattacaggcgtgagccaccacgcctggcctaatattctatattttgtttaatgttaattttgttcattgtcttctcccagtagcttttgagctccaatgtgggcagggtatattttctcctggtttggttgttgatgtatgtacaaattgattagagtttgagtgaatgaatgaatgaatgaatgaatgaacagaccaagaccctctgagatgagaatttgttgagggcatgactaaggagagaccctcctgtgaagggcgttattacagtgttatctgggcatgctcagtattagcaggctccattgggaatggctttatggggggcataagcatgatctggcatttccccctaagcattttcctagaaaaaaaaaatcaaggctggagattggcccgtaataagcagtagaaggggaaacaagaaaatgtccagtgggcaggggaggccaaatcgcagaaagcctcgggttacgtcctaggcaaggtatatgaggcaacgagaaacgtccatgggcggagcgtcctcggcattatgtgagcggggtcgggatcaggactgaaaaggtgagacttgggactgggactttgaaaagctgcttaaggaactgggcactgctctgaggccgtgggagaatccaattaagactatcaggggctggctggcgtggtggctcacgcctgtcatcccagcgctttgaaaggaggctgaggagggagtatctcttgagccccagagatcaagaccatcctgggtaacatagtgagacccccatgtctaaaaaaaattagccaggcgtggtagcgcacgcctgtagtcccagctacatgggaggtatcgcttgagcccaggaggttgaggctgcagtaagccacgattgcaggactgcgctccagcctgggcgacagagtgagaccctgtctcttaaagaaataaaaataaaaaagtcagaagaatggacactgggagtggacgaaaggtagggtccattgcttggtgttggaagtgtcggaagcaaagcataaagaacctgggggcttgtctcaggagggcgatgacagccaatgaaaagcagtcatgggcgtggcgctgtcaaacttcgaggggcgggaccgaggacacagagccggggcggagcccaaggtgaaaccaatgagaagcctccgggtgggcggggcatcggcctaaggccaagggcggagccaatgagaagcagcgccgcgttcccgctgccccccgcccccgtggggcgcgcgccggagccacgggcagccgttaggggcggggtctgcagccgcccgcgcgcggctcgcgccctcccctttgtgtcgccatggcggcggcagcggcgacgagaacggcgagcgaggggtcgagcgcggccggggcctgaggaggctacgcgaccatggtggtaagggtcccacgcggccgtcagcctgtccgtccggatgtcagtctgtccgtgcgcagccccgccccgcgcgccccgcccccggccccgcccgatcccgcggcctgtgcttcagccgtggtccctcccgtcctgcggccccatcccgggtcccagcccgtacctcgaccccgccccctaagcgcgcatccccgtcttccacgccctggatggggtgacagggacctagggcctgggctgggaggaggcggggctagtccaggaagggacccgcgccacccaagtggcccctgcaggggcctcctgaggctcctgggtccttccccagctcccatcccagcaccttcctcggcatccttctgccagccctcagccctccccggcggagccccctcctcctccccacagcccctttctcattcccgagccccaccccccacccgctccatccccagcctgacccttttcttctccttctccctcattttcaccctatcccagttcctctcaatcccccccgccccgcatcagtctgagcctttgcctcgtctctccagccactccttccttactccaccccaacaggccagcactgtacctcccttgatcctcgggtctgctccatctccttgtcctcatccccctcccccaccatttccctctcccaccatgctgctcccgctcattcatccattcattccctcacttagcagacattcactgagaccgcctctgtgcaggccccacgctccaggcacagagagagtcagctcccatcctgccttggggaaccttatgggctggagggggacagaccctgagggtgagaccctgagggtgactgggggttgcagggacatggagcagggagacgctacagcccagtgaatctgtctggcagctggttaatttattcatcagattttacccagtccctgctgcgcgcgactgggctggcactggggacccagaaaagaatcaggaacaatcatgtctgaacaccaactcaatgcccagctctatgctggggagctcagtctggggccctccttctgggaggccggtcatagtccaatgagagagatgaacttgtcaccaccagtgccatctcagagtgatcagagctgtgaagggagaagctctggtcaaggcatggaacctgggatgggggaacctcaggggatggagagagtccagaggagatgccaggtgcagcctgaagggtcagggagaacttcctggaggagggcacatgtgagttgggacctgaggggtgggagtgaggatgaatgtacccagggaaaggtggggcgagtgttccaggctgagggaacagcctttgcaaaggcctagaaggaaatgagaagagggtgctttttttggactcttagaagttcaagagctctgagagtgggggcaatgggaagagatgggactggagaggtaaacagaaatcagctcagggaagtctcgattatcagaccagagaattcagacttcgtcttgaagacaacagggagtcattgaaggcccaggatctatggagaaatagagccagatttgtgttttctgaaaacgatccaggctattgcggaaaagctggcaggaggggagaggctggaagcaggaaggctgatgagatgggagttgtgattgtctagacagtggtaggagatcactgtactctgcaggggctacggaagggttttcagcagggagagatgggaccagcatgctctccatcctgttgccccgcctcacgtctggcccctgcttctccagtcccccaccccagaccacacacgaagaagcagtcctgtcctcagcccagccctcacctcccccgacctgccatcctgcttcatgctcagggcggtgtgtggagcgcccggggctctggacccgcgctgccagataacaatgctctcgttgtctctttgctcccatctctgggggcctctgattctttctgctctacaggcacgcagcactgacagcctggatggcccaggggagggctcggtgcagcctctacccactgctggggggcccagtgtgaaggggaagcctgggaagaggtgagggtgagggaggaaagggctcagctaggagctggggagactcaaggagctgctggtgacgcatcccctgtctcccaggctctcagctcctcgaggccccttcccgcggctggctgactgcgcccatttccactacgagaacgttgactttggccacattcaggtatgggggctttgcatttgcacccaggagggaagacaatatcctacccaaccttgcaacgatatcaggtgctttgcttctgaaacttatccctgtgactggctgctgcacgcgtctgagcagtcagtagcaaaagttgcaggagccacagcagatggggagagctgctcattcattcatccatttgttcttttattcattcaacaacaacttttgttaggtatctgctctatgtcagggaccaggacatcaccaggccctgtcctcggggaggtccagaagggagtcacaaacccgtccctagatagtgccatccccaggaggtcaggactgggacaaaagtccacctgggccttgctttccctctgcagctcctgctgtctccagaccgtgaagggcccagcctctctggagagaatgagctggtgttcggggtgcaggtgacctgtcaggtgaggccatcccgcctctcatctagcctgagagaatggccactgtagtcctcagctcggtgtcatggggcccctgctcccttctgtccctctgctcccacagggccgttcctggccggttctccggagttacgatgactttcgttccctggatgcccacctccaccggtgcatatttgaccggaggttctcctgccttccggagcttcccccgccccccgagggtgccagggctgcccaggtaacctgcttgttgtctcagcccctgcctcatgagtgtgtcctcatccacagtgtgaaatcatcaaggcagcgggatagagaaatatttaaatactggtatggcccaagtcccaaccaatctgaatgaatggagaagccttagaaacgtagtaggcttctgctacatttagctttgctaagttttaggatcatggggagttccagggggtcccatgggagggtcaccatggtcatgccaaccagggtactcaagagcttggcccagcctgcttattcattcatatgcccatatctcagtacctaacagctgagcagcacccatgtgttcaggatgaacttcagcccagagacgagctagggcagtgtgggagggcagtgggctctctcacgtccactcacagaggcccactctgacaacctgcccccagatgctggtgccactgctgctgcagtacctggagacactgtcaggactggtggacagtaacctcaactgcgggcctgtgctcacctggatggaggtgggcctgggcagggggcttggagattccgagtgggtgagggggtgtctgaggggcgagaagcagcctcggtgtgtgtgtgggcatagaaaagaaaggagccagagtggaggaggcgttgatattttagtgtctgtgtgggcgcatgcctgtgagagaatgtgtgtgagcatgtgtgtgtgtgcacgtgtgtgtgttagcaggtgttcggctttaaggatacaagggtttaaatgtatatcagttagaaatgggttgggctgtaactcacagaacacctggctatgagtggcttaaaccagaggggttttttttcttttcttgagatggagttttactcttgttgcccaggctggagtgcagtggcatgatctcgcccaccacaacccctgcctcccaggttcaagtgattcttttgcctcagcctcctgagtagctgggattacaggcatgtgccaccacgcccggctaattttatattttcagtagagactgggtttctccatgttggtcagactggtctcaaactcctgacctcaggtgttccgcccacctcagcctcctaaagtgttgggattataggcatgagccactgtgcctggcctctggctaattaaaaaaaaatgttttgtagagacagagttttgctatgttgaccaggctggtcttgaactcctggggtcaagcaattctccaggctcaccctcccaaagtgctgggattacaggcgtgtgccaccacgcccagcacagagagattttagatggcaaccgtgtggcatctgctgtggaggatgaaggtgcagaggtggatggggaagccttcaggtggggaagcctttgggtgggagagtcctgggacatgtgaggggaaataaaggggtttttcttagaggtttccccacccgcagagggtgccagggctgcatccctacaaacaggaatctaggtgtttgaccaatagctctgagtgacaggggctcttgacgggggcgggcagtggcctcacccagcgcggaggagcttggtatgcctgcactaacaccgtcttctgacctgtccttgccacattccacctctatttcagctggacaatcacggccggcgactgctcctcagtgaggaggcgtcactcaatatccctgcagtggcggccgcccatgtgatcaaacggtatacagcccaggcgccagatgagctgtcctttgaggtgaggctgtggggaagcagattccagctgggctccccacaccccctgctccttctgacccttctcttcccacccgccctctcccaggtgggagacattgtctcggtgatcgacatgccacccacagaggatcggagctggtggcggggcaagcgaggcttccaggtgagtccagctgggcgcggacaggtggggctggggtacctgccaactggggtggcccagctactgaccctgaccttcctcaggtcgggttcttccccagtgagtgtgtggaactcttcacagagcggccaggtccgggcctgaaggcgggtaagtgccatggatggatgggaggtgtggggaggggtgggaaggggtggggcctcctgcgtcttttgcctcccactcatcccttccaccccatttttcgcctagcagatgccgatggccccccatgtggcatcccggctccccagggtatctcgtctctgacctcaggtaatagaaataggcggtcaggtcccagcccctaccccaccaggcccctggccatgctgaccccacaagacctgcctttgccctttgccccttgcccccacagctgtgccacggcctcgtgggaagctggccggcctgctccgcaccttcatgcgctcccgcccttctcggcagcggctgcggcagcggggaatcctgcgacagagggtgtttggctgcgatcttggcgagcacctcagcaactcaggccaggatggtgaggccggggcccacccaccccacccgtcacaccagggctgcggcccacccagccctgaccttgctttctcccagtgccccaggtgctgcgctgctgctccgagttcattgaggcccacggggtggtggatgggatctaccggctctcaggcgtgtcttccaacatccagaggcttcggtgagggcccttagccaaccctgtccttccacaggcactcacccagcacctccactccagccccgtgctgcatgctggggacacagttaccaggagtcaggagtggcaggatcaaggctggggtcagggacagctctcttgagagtagagttagcagtctaagcgaggactatcttcaccgagcacctgccacgtgccaggcactgttctaggcactggggacgcagcagtgagtgagacagccagaaacccctgccctcatagggcccatgggctagaggaagagacaaacaggggagggatagagttcaccagaagatgacaggtactatggaggaaaacagattggggtaaggaggatggcgacgaagagccaagagggaggcctgcagttttggatggcaagggcagagccacctcatgcgagggtctggaggaggggaggggcaggccatgcagagggagcagcagggcaaagggaacagcaacaggaggccatggccaaggagtccccgtgccagcgcaggcaaagccttcatgttagggttttggcttttactataagtgaagggggaaccgcaggagggctctgagccggggcggggtctagaggcggggaggagccaggcgagatctcggcctgcaggaggctgagaggggagtgcttgaagcctgcaggggggtggccaagagggaggcaggaggtggcaatgggtgggagattttaccacaggcagtggggccccaccagagaattgggagtagcagggtgctgggattttgtccacattttccagtgccctcttacagccaggagaatggcagctgcatggtaggagctgctcatgctctggagtcagacagtcttgggtagctgcaggcagaggcacctctgtctgagcctcagcatcctcctctgtaaatgcggcacccttctctttgccacacaggcttgctggggagttcagtaaggttctgcctctgaagagcccagtgtaggacctggggaagagggttccatccacctgcgggcacttgggggtaggggcaaggggagcatggccacgtgagcgagcccctctgacctggatcttcctcctccttgacacggtggtctcaggcacgagtttgacagtgagaggatcccggagctgtctggccctgcattcctgcaggacatccacagcgtgtcctccctctgcaagctctacttccgagagcttccgaaccctctgctcacctaccagctctatgggaagttcagtgtgagtaagggagctggcgggacggagggggccgggacgcctctggcccagacctcatcacacctgcccaccatctcaggaggccatgtcagtgcctggggaggaggagcgtctggtgcgggtgcacgatgtcatccagcagctgcccccaccacattacaggtaaaccaggaggggcagggcgggacttggtgggattccaagggggttgaggctcaggtgccccctctgctcccacccccaggaccctggagtacctgctgaggcacctggcccgcatggcgagacacagtgccaacaccagcatgcatgcccgcaacctggccattgtctgggcacccaacctgctacggtgagctgcttgctcgcctgcctgcccctcaggtctttccccaaaaccaccccaggaacccgcccagcttttcttttgtttattcatcgaatacgtgtctatcaaatacctcccatggacctggccccgtccctagcactggggacccagcactgagcatggccctgtcctcctgggactcatgttctcatggaggagatggaccatgaacatcaacaggaaaaatacagagtaaagtctgatggtgatgagtgctgaggaggagagaggaggagggaagggcagtgtgcagggtcagggcagtgtgaagtttttagcgagagtggcaagggaggctttggcaggtcttctgtggccagcagcagaataagcctggaggatttgatggtgaacgagacaggcatgatctctcccctgccggagttcacagtcttctgggggcacagatacataaacaagtaaaacaggtggtatgtcagaggacgggcgtaagatgtacggagaaaaataaacgagaaaggccaggggtacagagaagggagtgtacagttttgaataaagtgggtgaggaagactgcactaagaaggcaatatttgagtcaagacctgcagaggatgagggagggccccaggtgcgcacgtggggagtgacaggctgagggaacggcaggtgcagacatctgggcctgggccggtgcctggtgtgttggaggagctgcagggaggccggtgtggctggagctgagtgagtgaggggctgagggagaggagatgatgaggtcagagaggtgacggggaccagacagaggggtgactcacaggtcatgggtcacagtgaggactttgctcttgcctggagcgaggtgcagccagggcagggctctgagccaggcgggccctgatggaactcaggtggtctcaggctccctctggctgcaggtgggagcatactttagggtggggaccggaaggaggctctgggatgtccaggctgggggagatggaggctgggccagatggggggcagtggagggggtgacagattgattgtgggagttaaagaggggggctcagggcaaccccaaggtgtttggccagagccacaggaagaaccacactgagatggggaaggcaggaggggcgggtctgggggaaggttgagagcccagcgaggcgtgatcagtttgaggtcagaggtgttgaatagacagtcactgcctcccctggctcccctcattgccctgccagaacctgctggctgggctcaaggcacccagcctccctcccgctcctcccacccaggtccatggagctggagtcagtgggaatgggtggcgcggcggcgttccgggaagttcgggtgcagtcggtggtggtggagtttctgctcacccatgtggacgtcctgttcagcgacaccttcacctccgccggcctcgaccctgcaggtatgccctcccaccccctgaggtcctggctactgcccaccacgatcagggctgcagggggagggcaggtgggctcccagtcccgtccccaccccactgaagctgggcctccctccggctccttgaggatcccgccccggcctctccctccccgcgcccccctccttctcatttcagctcctccgctcaggattcccacctcttggcccggacgccgctcttccttcaccccttgtagctcctgggggcgcttggggccatgggtccacctgggaggaggtgggaggtccccagacttgaccccgccccggccccacccagactccccgccctgccccggaccccagcccagtcaggactcagcacgtcggagggccctctggcccgaggtaactgaagccagagccgctgccctcgctggctgccgggagctgcctcctcatcagctcgtcccgccccgccctcctcccacctgcctgctgcccgcctgctcccgcctgatccgccccggccccctgccttgccagcccgggtgggcatgctgcggggccggggcttgggctgtggcgcttggctttgcctgtggccttgggcggccccagagctgacagctgccccctttccacactccccaggccgctgcctgctccccaggcccaagtcccttgcgggcagctgcccctccacccgcctgctgacgctggaggaagcccaggcacgcacccagggccggctggggacgcccacggagcccacaactcccaaggccccggcctcacctgcggaaaggtgagtgggatgctgggggtggcgaggggcaggtggaggcctggttcctcagacggcctcctgtttctcccccaaaccgcaggaggaaaggggagagaggggagaagcagcggaagccagggggcagcagctggaagacgttctttgcactgggccggggccccagtgtccctcgaaagaagcccctgccctggctggggggcacccgtgccccaccgcagccttcaggtgagaggctgagccatgggctggtgggcagcgatggtcgctggagtgccctcctacctctccctctcctgcaggcagcagacccgacaccgtcacactgagatctgccaagagcgaggagtctctgtcatcgcaggccagcggggctggtgagcaaggcgggcaattggggggcgctacctgtgcccatgtggagccgggaggaattggggccctggtttggcctccaaattttatacttcacatttgggggccctggggcttttgaaaaatttaacctggcctttatgtacaatgagttggatacagtatcacctttggttcatcacacactgaacttaacttactcattggtccatgacgggccctttaaaagtctttattattcctgttgaacattttaaaataatatcatggacacccatgaacccagcagccagaactagagcagccccattccttctccccttcgagttcctccccactggaggcatcctctcaatttgcagactaccctgcccttgctttccaggtctgatcatacacaggtgtgtgtgtaaggatcatactgctcagttctagccattttggaaacttgatttaaagggcgttgtaagaaagggatgccgcactgtatggggagcttggctttttctccatcgctacctcacagcccgccgcgctgctgggtgctgctctccgacctctgcggggggctgcttatccaccccacccagccgtgcctctgggggctcttctgagccaccgcgccatcctcacactcctggggtactgccctcccacatacccaggagcccaggtgctgtcctgctggctcagcagctgtatgtgaatctgttggtctcgtgctcacagcctgtggggcagccacagggccttcgtgctttgggccggaagtgtcctcttcatggtctccactgtcaatctgaacagctcttcctggcttcacactactgtggccctctccaggaggcgcctcttcatgtcctttccccagctttctgtggggctgtgcgccctgttctcagggatggtctcactgaccccacccctccaggcctccagaggctgcacaggctgcggcgaccccactccagcagcgacgctttccctgtgggcccagcacctgctggctcctgcgagagcctgtcctcgtcctcctcctccgagtcctcctcctctgagtcctcctcttcctcctctgagtcctcagcagctgggctgggggcactctctgggtctccctcacaccgtacctcagcctggctagatgatggtgatgagctggacttcagcccaccccgctgcctggagggactccgggggctggactttgatcccttaaccttccgctgcagcagccccaccccaggggatcccgcacctcccgccagcccagcaccccccgcccctgcctctgccttcccacccagggtgaccccccaggccatctcgccccgggggcccaccagccccgcctcgcctgctgccctagacatctcagagcccctggctgtatcagtgccacccgctgtcctagaactgctgggggctgggggagcacctgcctcagccaccccaacaccagctctcagccccggccggagcctgcgcccccatctcatacccctgctgctgcgaggagccgaggccccgctgactgacgcctgccagcaggagatgtgcagcaagctccggggagcccagggcccactcggtgagtcctcagcctaccccacccctgtccccgccagctgtcactgactctgagggcctggccccagctgaacccctctccattcatttatataggtcctgatatggagtcaccactgccaccccctcccctgtctctcctgcgccctgggggtgccccacccccgccccctaagaacccagcacgcctcatggccctggccctggctgagcgggctcagcaggtggccgagcaacagagccagcaggagtgtgggggcaccccacctgcttcccaatcccccttccaccgctcgctgtctctggaggtgggcggggagcccctggggacctcagggagtgggccacctcccaactccctagcacacccgggtgcctgggtcccgggacccccaccctacttaccaaggcaacaaagtgatgggagcctgctgaggagccagcggcccatggggacctcaaggaggggactccgaggccctgcccaggtcagtgcccagctcagggcaggtggcgggggcagggatgcgccagaggcagcagcccagtccccatgttctgtcccctcacaggttcctacccccggcttcttctccccagcccccagggagtgcctgccacccttcctcggggtccccaagccaggcttgtaccccctgggccccccatccttccagcccagttccccagccccagtctggaggagctctctgggcccccctgcaccactcgacaggggagagaacctgtactatgagatcggggcaagtgaggggtccccctattctggccccacccgctcctggagtccctttcgctccatgccccccgacaggctcaatgcctcctacggcatgcttggccaatcacccccactccacaggtcccccgacttcctgctcagctacccgccagccccctcctgctttccccctgaccaccttggctactcagccccccagcaccctgctcggcgccctacaccgcctgagcccctctacgtcaacctagctctagggcccaggggtccctcacctgcctcttcctcctcctcttcccctcctgcccacccccgaagccgttcagatcccggtcccccagtcccccgccttccccagaaacaacgggcaccctggggaccccgtacccctcatagggtgccgggtccctggggccctcctgagcctctcctgctctacagggcagccccgccagcctacggaagggggggcgagctccaccgagggtccttgtacagaaatggagggcaaagaggggagggggctggtcccccacccccttaccccactcccagctggtccctccactctgagggccagacccgaagctactgctgagcaccagctgggaggggccgtccttccttcccttcaccctcactggatcttggcccaaccaaatcccttgttttgtattttcttgaaccccgaccactaccccaggtttctaactttgtaacttgcttctgatgtgggtccctaacctataatctcagcttccctaccctggactgaagggtctgcccatccccccaccaccctccatcctgggggccctcgcacaaatctggggtgggaggggctaggctgaccccatcctcctctccctccaggagcccccagcatgtcctgacctgtgcacggggatggggggacaactcctacccttctttccccacatgccccactaaaccatctgacaacattaatgaataaaatggtgaaaatgtggctgctgaagtcgttctggggccaaactcagtgagtgaagacagacagagggggcactttatcattctatttccttttggggaggcaccaaggcaggagttactcctgggagcctctgagaggtggtatctgcagagaggggaaccatgggcaccctgggagtctaggtcaggagtggggctcaggctgggcttttctccaagctgacatcctttttgtagctctgctatgatctcctccagcaggtccatcctggggagcagtgaggcacaggtagacctagggttacctcagggataaagacctagggttacctggggtcctcccatccaaggcctcgggtctcacttctgcaggctggagaagagacctcctctagtcagctcagtaccgggtgcctgcaggagagaaggctggagctgccacctggtagccatggtgctccagcgggcctgggagggcagatggggcacaggctgagctcggggtcctctgcttagcctgccctcgtggccttccctgccagcagcctcccagtgtgtgggaagcctccctgtgggtcagcaggctggggatgggctcacagggctggggctccagcagaataaccctgtgtgtgcgccgcagcagcccctgcagggctggaatcttggctgagagcttcctcaaactgttccgcagagctctgggtccccagcagggaggctgagtcctagaggctggagttggagtgcagggaagggccctgggggaagcagggttggttaagggtcataggtgagtgaggggacagttgggcgaccctaaagttccctggtcaaaggagaggcagccagggaacttcgggttggtgactcctggagggcgggcggagggggtcacaggttagcagtgggacagttgtgcagggctctgggggtatctgtactgttgagctgggctccaggcagcagtgcaggctgaccctggctgtggggctgtggccagacccagggctgggtcctgggctgggcccagagctgctgcctagagtcaagctgctgcccaagttccaggctgcaccccttgggatcctgctgtggtctctgacctcaggagtctcaggcctgcagagaaggatggcagagagctggcatgggttgcccaggtgtcccacagctcccttggtcccccacagccccgtcctggctcctacctggcatgggatggggcctggggacatcacaggggccacaggcctgggtgtggtcttggctctgtgagccacttgatgtacagtttctctgtggggacagaccagttggtcagcacctgccagcatcccttccttgccctctaacttggtggggaaccctggggtgcaggggatagcgtggtccactccattggggagctcacctcaggagccacgtcctgtggaccggaggctgggtgtggggacacaggcttgcctggggtcccatggccaccacccaccccctgctgacctgccctgtacctgggccggggcctcccgcagtaggtatcgggtactctgcaggctgccccagcggtcagcaggtgctaggcctagcccagctcgaatcagggcctggtagggtgctggcacccggggctccagggccggactctcccctgcctccagcttggccttcacctcaggtccccctctcccagcccagggcagctctcctgccaggaagcacagttagggacccaagcgggagggtgccttcatggggtggggcgcagccactcactcaccagtgaagacctcctggatcaggatgcagaagctgtagaggtctgaggtggtggtgggcatgtcaccgcagatcagctgaagtggcagccatgggtgtagttcagggggcgggggaagccctgggcctgggcctccccaggggtagcccttctgctgcctgtggagcccaagggccctggtgagccgacggctgctggacagggacctgcacccgccaccagacaggaaaactgagaccccaggtcacacagcccagcagtggtagggccagcacctagctcctatgccactcacagtgcccctctccacccccacctcctccctggggtctacaagacaccactgcccatggccacggaggctggagaacagggaggaggggagcgtgcaggcccgagtcaaggggcagcaggcagggcaggcactcacctgggccgcagccagcgctggcgtaggaggcgcctgtgctccaggtggcccactttagccaggcctggctgcaccagctacacggtgtgagagctgaagccactgtgagctcgccagtgggcctgcaggaacagcagggcctttagcacctgctgcagcagggggccggggcggcaggcccagcacagtcccaggtgcctcctcacttggtctcggtgggtgcagcaccccctgcagggagcccagccacacaggctcaaagagaaggcacagccccgacagatctgcagagggactcagtgccatcagcagcaacaggccagggtggtgcagcttgctgggcaggaggacagcaggccactcacgagcaggccccagccacacagggtgggagatgctcctgggcccagactgcccaccacgtgccagggcaggcaatctgcacctgccatcagacagaggaaagactgatcccaggtcacgcagcccagcagtgggagggccagcacccaccgcctacctcatcctggtgccttccacacccccacctcctctcaggcctacagggcattgcacacacaactggtacccacccactttccagtggggggatcgccccagcagaagggctccatgccgggtgctggcccagaagtgaagattctggccatgactacggccacacacccttgtcttccgtgggagggccaacaggaggcggggctgggggctggcacaggtacctgcagtgctgaaggtcagccagtagcacatctgtctgggttccaggggccttcggctgctgcacagtcattttgtgacccatccacaggaggctggagaataggggcggggcagtacaggcctgagacgagggggctttccctgggaggggagcaggagagctggcaagggcacagcggggctctcacttggccatgagggtggggagctgctctcataggtgcagtcaggctctccctgggctgccagcagctccttggggtccacaagggggatgcccgttaccagccccggtggccacaggctactcagctagggacaggcaggatcatgaggcacgaagaagacaggggtggttcccactcctacagccactcctgcttacctgaccaaaccccaaggccgggacttgggaggctctcctgatctgtgctagcctcagcatcctggggtgggggcaggccgagggtaagtctggggtggctgggaatggttgggcgggtgggcttcaggatgtggacggttacctgtctgcctgcatcagcctcagggaggacagggagccaggcgggctgttcccaaatctggcctgcaactggtccagagatgccatgggtggcaactcaccgtcatgcacgaacgctgatatgtgggcccggcagagctgcaacaactccagcaactggaggagggcacgtagggtgaggcctgatgggtgccggccctgatccctcactcccaccagggccactgctcacctcccagttctgcttggccccaccctgctcagcccagtcttgtggtgtgcgaccccgctggtcatgcagttgcaagtcaccccctgcctgcagcaggggcaccatcactaaagaaggcgcctgcaggcacgggggtgctgccatccaggcagcggttagagcagaacaacgcggtgggagtcgattagggaagggactgaacagggacaaaaaggggcaggatgggggccctgggggatgggaggagtcaccatgtcatgggaggtgaatatgaggatgggaggggtcacatgagggcaggatggggtctttagggaatggaggatcactacgagcatggaggcactgggagaatgggaacagtcactggggaatgagaaggggttaattgagagaataaggagggttactggggggacaggagggtcaccagggaatggaagaggcatctcgagggagagatgcctcaggggaagagagccctagctctcaggctttctggggctcaaacttgggcccctggggatggggggcatcactggctggccagccactggttgggcttggcaccaaaggccagcaggagctgcatggcagagccgtggcccagcagcgccgagaggaagagcgctgtctgcccctcagagttctccccgtccacctggacacctaaggggcaggcaggcttaggacgccccaggcccatactcctgggttggaggcctgagggccgctaggcaaacacccttgccaattcccatcctccacagcccctccatgactggatgactatggaccccaggttccatctctgtgtcctggaacccctgccctccagctgctgaggaccatgcctcgcaatccacctcaacacagtgctccccaaatcattaagtccacagagttgaaacaaggggtgacatctgcctgctgtgcaaacatctatcccccaacccagggggatcaaaatcacacaaaggtccccatgggccaggaggaagtggatttcaggggactttgacttccaggagccttgcgcactggccgggacaggcggactccacccagctgtgactcagtgtggtacacacaggtcccatgaggccagcactcagcaattcaagtaaagcaaactctggattttatcagatctctcaaattttatttattttaatttttaattttttgtagagatggggtctcattatattgcccaggctggtcttggactcctgggctcaagcagttctcctgccttggtttcccaaagtactgagattacaggcatgagccaccatgcatggtctcaattttatttttgaagcctgcatctaagggctcaatccagttggcaaccccctccatgtccttacctccaggcctccgccaatcccctccccaaccatcttccagctcagctccccctcccaaccactcactcctgccccaagccctgggtctccaaacccgtcattccccagttcctcttcctccagcccctaccccaggtagagcaaatgcatggcatccttgtccttgcactcctgtgtccttggcagacacggctaattattcatgcactgggcccaacccagcgtggtctctgccacaaaacccctccaaatgtggaccttcaggaatctctgaataccagatttgcggcattgcatttgactcattagctcactatcttttacaacagcatcttaactgcctttctgcactcatcctgccccacagaggcctttttttttttttttttgagacagagtctcaatctgttgcccaggctggagtgcaatggcgcaatttcggctcgctgcaacctccgcctcccaggttcaagtgattctcctgcctcagcctcccaagtagctgggattacaggcgtgtgccactatgccaggctaatttttttttattttagtagattaggggttttgccatgttggccaggctggtcttgaactcctgacctcaggtgatctgcccacctcggcctcccaaagtgttgggattacaggcatgagccactgtgcccggcctttttttttttattttaaagacagagtgttgccaggcatggtggctcacgtctgtaatcccagcactttgggaggctgaggtgggcagatcacctgaggttgggagttcaagaccagcctgatcaacatggagaaaccttgtctctactaaaactacaaaaactagccgggtctggtggcacatgcctataatcccagctacttgggaggctgaagcaggagaatcacttgaacccaggaggcggaggttgcggtgagcagagatcatgccactgcactccagcgtgggcaacaagagtgaaactccgtctcaaataaataaataaataaataaaataaaataaagacggagtctcactgtgtcacccaggctggagtacagtggtgcgatcacagctcactgcagccttgacctcctgggctaaagtgatcctcccacctcagcctcctgagcagctaggactacagcacactccacagcacccggcccgaggtctcttcttaaaacacaaatcacttttaaggactagataatcttatatgagttgttccaaagaaaagaaaaatagaaaaagaaggcaaggctcattttatgaggctagcaggaccttaattccaaaactagatgaaagtttccagaaacagaaagtaagattatatatcaattgcatatatatgcaaaaactttaaataaaatagaatagatttatccccataaagcaaggatgattcaacataagaaaatctatcagctgggtgtggtggctcatgcctgtaatcccaacactttgggaggctgaggcaggtggatcacctgaggtcaagagttcgaaaccccttctctactgaaaattcaaaaaactagccaggtgtagtggtatgcgcctgtaatcccagctactcaggaggctgggacaggcgaatcgcttgaatctgggaggtagaggttgcagtgagcagagattgcaccattgcactccagcccgggtaacaagagtgaaactctgtctcaaaacaaaaaaacaattaaaactagtaagcaagttcagaaagtggcctgaaacacaaccaactttacaaaaatcaaaacagaaattgtacattgttaatttaatgggttattgttttgagacagggtctcactctgttgcccaggctggagtgcagtggcctgatcaaggctcagtgcagccttgaccttttgggctcaagcaatcctccctgctcagcctcccaagtagctgggactacaggcatatgatgccaccactccctggtaatttttttaaaatagagatagggtcttgctatgttgcccaggctggtctcaaactcctggactcaagcaatcctcctgtctcggcttcccaaagtgctgggattataggtgtgagccatgtggaacaggttgcccagcccaatttaatgttaattatgttaatttcctgcttacaatgccaacagtttcctatcacacacacaaaatccaacaaaactcacactcctttagaggcccttaactgtgtggacttgtggccacttcagcctcacgtctctccaagtcctgctgctactcatacatgggcagttcattttgacttcagagcgtttgcacagcctcttccatcactccccacttctttttttttttcttttgagacggggtctcgctctgttgcccaggctggagtgcaatggcacaatctcagctcactgcaacctctgtcttccgggttcaaatgattctcctgcctcagcctcccaagtagttgggattacaggcacatgccaccatgcctggctgatttttgtagttttagtagagacgaggtttcaccatgatggctaggctggtctcaaactcctgacctcaagtgatccgcctgcctcggcctcccaaactgctgggattacaggcatgagccattgcaccccaccatctctccccacttcatttcaccttttttgcgtggctgactcttatactgtaagactcaagcatcctccacctgaaaggccatactgtctagggtctcatcctcatcccactgcatttcattcccaatggtccaagggtcatgttcacccttaaagccccatcagggaccacagagctcgggacacagtcggtgttcggtaccactgctgactggccaactgaagccacaccctccatacagctccttgatcctgccgccacagatgtacctgcggccaggccctcacctctccgcaggagcctggccgggccccatcctgggcccccagccacagccaggtggtgcagacggcccacctgggtgtctagatccctcttggagcccagctccactgggaagcgcgaaagggctgcgagggcatctgtgggctgcggctcagtcggctcctgggcagggatccgctaggggggtctcatcagggaagggggatgtgaaggactggaactttgggcacaacaaaacaatgaagacagagctggctgggggtcctgggggcgcagtctagacgggaacgggatttaggaggggtctgatgggaagggaggtggctgaatgagaaaagggggtggctctgggagggcgacacaccagaaggtctggggtcgcagggaggctgagagctgagggggatctaaggcaatcgggagtctgggagggggcttagggctggggtcgggcgtgccagggtggcagaagggctgcgaggataggatccgagcttgggaaaggagtcggagggctcaggaggaggctctgaaggctgcggtgggaggatgaggcgcctgtggtttaggatctgagaggcggtgagaggggtcatggggaggctctagggacagcgtctgtggggtccgtggggtggatggggtctgagggcagcgggcgcgctctgaaggaggagagggcgctgatggcaggatctgccgactgtgcgggggtccgcgggtgggacgcgtggactaaggactagggaagtgtctgtgtgttgggggtgggggctacaggctggggaagggggctctgaggacagtgtctggggctggggaaggggtcagtggaatggggaaagggttcgctaaaggggcgggcaggggtgtggtctgagggccgcggaagagaaggacagggtgggaggggcctgagggctgggggaagggtctgagggtgatctgagggcccagaaagctctgggaaagttctgggcccacaccccagtcctggtggctttgcactcaccgttgggctagatagtggtcgccacctgactgccacatgatccggccggctgtatgagcgggaatccgaggtgcttgagcaccagtggcctcccgcagcgcctgcgcagtagcatccccttccccaacacagccccagccactcagcctgggccccacagccctgaccagtcggggctgtcactgtctgaggacggggctgtctacccacaccggactaagccctgtaaggcagggccttgggtcgttcttgtcactgttgtgttcacagcgttgttcaccccagaacctagctcaaaagaggcctcattcagtgcttttattctcactctgtcgcccaggctggcgtgcagtggcgcgatctcggctcactgcaacctgcatctcccaggttcaagcaattctccttcttcagccttccgagtagctgggattacaggcgcacgccaccatgcccggctcatttttgtatttttagtagacacggggtttcaccatgttggccaggctggtctcaatctcctgacttctgcccgcctcggcctcccaaagtgctgggattacaggcatgagccactgcacctggcgtttttctcagacaggatctcactctgttgcccgggctggtgtgcagtggcaagatcatagctcactccagcctccacctccagggctcaagccaacctcctgcctcagcctcccaagtagctgggactacaagcacaggccacccaccacacctagctaatttttttttttttttttaagatggagtcctgctctgtcgccaggctggagtgcagtggcacgatcttggctcactgcaacctccatctcccaggttcaagtgattctcctgcctcagcctcccaagtagctgggattacaggcgagtgccaccacgcctggctaatttttgtatttttagtaaagacagggtttcaccatgttgggcaggatggtttcgatctcttgacctcgtgatccgccggcctcagcctcccaaagtgctgggattacaggtgtgagccacagcacctggctagctaatttctttctttcttttttttttttttttttttttgagagataatggggtttcactatgttgcccaggctggtctcaaactcctgacctcaagcaatccacctgccttggtctcccaaagtgctgggattacaggcatgagtcactgcacctagtttcattcaatgcttattaactgagagaatggcttggctctttcttctgtccctccctcgccaagtggcctgggccgagccccttgacttcagtgccttggtgtctgctccccatgtgtgcccttcctttaggcatcccctgggatgaagaaagttctgcatcagtcactggccagacccaacccaggatggtctgcctcagaggtgagggaggcttccttagtcctccgtcaatgccctggctatgctcaatgggtgtctaacgatcttttttttttttttcttttctttttttttttttttgagactgagtctcactctgttgcccaggctggagtgcagtggcgtgatctcagctcactgcaagctctgcctcctggattcatgccattctcttgcctcagcctcccgagtagctgggactacaggcgcctgccaccacgcccggctattttttgtatttttagcagagacggggtttcaccatgttagctaggatggtctcgatctcctgacctcgttatccacacgcctcggcctcccaaactgctgggattacaggcgtgagccaccgtgcccggcctctttttcttttcttttctttttttttttttaaacacagtctcttgctgtcacccagactggagagcagtggtgcagtcataggtcactgcagcctcaaacccctgggctcaagtgatcctcctgcctcagcctcccgagctgggaccacaggcacgcaccaccatgccctactgatttaattttttgtagagaaagaatattgctatgttgcccaggctggtcttgaactcctagactgaagcacgcctcccacctcggcctcccaaagcgctgggagtataggcgagagctaccactcccagcctaacgatctctcttgaactgcaaaacccctagcttgggctggctgaggtcaagatgagcccttccccaaggaggcggcgtcagtgcaggacagcagcttaggcagcacctaaggacttttattgaccacatgaccccct

SEQ ID NO: 515 - DNA, 417 bp, Homo sapiens
gttgatttataccaattacaagtaaatacacttaggagatacaaaagacacttcaagctaccaaccagaccaggacttaataaagcacaacttgttgagatagttggttgccactttaggtctattccagtgaatgaaaaagacaccttaacatatttcatctactcagtgaagaatgacaagaacaaatcagatctcaaggttgatagtggtgttcactaggagacgtggaattgagactaataacttggatgttaacactgtttactgttttttcacatgtagaaatgttctttgtgtattttttctacagaggattttctctgattttattttctttgttctgactctaataattagttggaactcatataaaatgagctttcctaaattaaatctattttaaataaagggtat

SEQ ID NO: 516 - DNA, 371 bp, Homo sapiens
gtgatttccagcccttcccactgggacttgacttcccaggtcaaggagtccgtctcattctggctggtcgagtgaccagaggcctgtgtgaatgtgtgmacctgcttttcctgcctggaatgttttctggctcagctgcagcaacatctgtcagcccagtgtctgccctgtgtccctgggctcgctccaagtgcaggaacatacatgcagggcccaacatgatgatggtgtgaagggcaggaaacagtcctctgaaggagtggggaggtgggcagtctgcccccgccaggtaccatcgcctcctgccagcttccttagaccagggagggctgccatggtgctagctgcaagtccatcagtattgaccgtct

SEQ ID NO: 517 - DNA, 1522 bp, Homo sapiens; identical to SEQ ID NO: 153

SEQ ID NO: 518 - DNA, 474 bp, Homo sapiens
  misc_feature (1)...(474): n=a,t,g or c
cgcccacctcggcctcccaaagtcttgaaattacaggcgtgacnnctngcgccctgccagattttgtatagtaatatatatataaaatgacctgtcacaggttggctttcatagttttacctttcctttgggtggtgcccttgggtctctactactgtctttcatcactcccaagaaattgagtagtgcagccaggatcaggaccagggattggcaaatgttttttgtaaagggccagataggaaatattttgggctttgaggactgtgttatctctgaaatgatcttgttccagtgttaccatgtcaagacaaccatagatagtatgtatacaaatggaacaggtatggctgtgttccagtaaaactnatgggttaaaaacaaccacattggcatttgggctaagggctttaatttngctactgacaagtgattagtccngggcnttaattttgttttttnaaccnttacagg

SEQ ID NO: 519 - DNA, 366 bp, Homo sapiens; identical to SEQ ID NO: 155

SEQ ID NO: 520 - DNA, 4905 bp, Homo sapiens
  misc_feature (1)...(4905): n=a,t,g or c
agtacccctatctgaaatgcttgagaccagaagtgttttggagttcagattttcttttggattttggaatatttgcagaatacctactgattgagcatatctaacctggaaatccaaagtgctccggtgaacattttctttgagcatcatgtcaatcaatggtcaaaaagttcaggattttggagcttcttggattatgggtgctcaacctgtataggaaacgtggagatggagcatgaatcagttgtatttgatacttgctggggaaaggatttccagaccaccagagaagaaggatcacccatttaacttggtgtatccagtgccataycagagccttttcttccattttaacctcaccagtagtctttagatttgtggtttatgatcaagaaattaartcctagaatacagattagtagagcaaagttgaggcttttgattatctatttcttttaaggtttttcgctttaacactttacagaagaatttctagactgtctgagaagaatactccaggtatttgtcccagtcttaaaatggytcaacaawaagttcataatcactttttagaacccttttcccaaaagaactgtgatcctacgtgtaacttaaaaaaagaaaacacacaaatgcttgcatcttttttcacatatttatctgtattcagcaatcaagaatagctggtactgatggatatctttacatgatttttcgttatttatctgaaaataatatatattgggtcattatttggcttttcaacctcagtaattcagtaactttctttcagttaattttgttgacctgttttggacrcttttcaaaatattcttagcatgattttactgggaagaacacattattacaagagttaggcagtctgagtccacctccatttgtgtccatcctctctcgtttgtttattgaatgccttcacctgtgctctgaattgcatctctttccttctcaggaaattttatacattgtcaattattccttctctctaacttcaacctcgccttctttgctgagtctgacccatcaacagttaaacatgatcaagtcttccgatttaaaagtccctctttcttgacacagctcatttatagccaaacttctttctgaagagtagtctacattcattttctttttctccctcacttctgataatattgagcgaactccattttagtttctgtccctatcattcctctaaattgattaaggtctccagaatattcctctgtatttacgggcattattcactgctcttcttatttgactactcagcaagcatttaacttttgatcagtttttccttaaaatactttacttggcttccttgacatcatggtttttgttcagatctctgtggttatttcygtctcctttgctgccttctcctcttggtccttgaattttagaattcttcaaatttcagttctagacratcttctgttcttactcttagctttccctatgtggtctcatcatttctcatgtggacatagtagtctccccacttttatttttgccaccttacaattttatccacagagcagctagagtagtctataaattctttttaaaatacgtaaaatcactcactgcttagacactacataatctagtccttggctgcttctctgaccctgtcttataccagtctgcatttactacagtccatctatactggcctctttgaactgttcttcagatatgataagcttgtccttgctaaaagctctaactgttatttctgcttggaatgctcttctcgtctactcttcctatgcctagcattttcttaatgtttaggtctcacctgagatgtcactttcactgtagtactagtagttgatgttactactgattcgttggcagtattcctgaaatagaatataggataaatgaggacatgtttattttgttcacagctgtgtccacaaaatctaacacagtscctgtagtactgtaggagctcattaagtagtcggctgattgatttttgtacctaatggttctattaacaatattgacccccaaatgtattttcttcataaccttctcctctgaactccagtctgtatatttaactgtctacctgacatttccycttctaagcttaaaagctcctccaattgaacctgtgatctctttaaatctaggactccaggatttcctgccacagtgaatggatttacctytcatctatctctgtaagctagaaagttgggagtcttcttcaatgccttctttccccctcatattcaatccatcaaatggattctatggactttgccacctgaatatctcttgaatctgttcctacattttaaactaccatcatttgatggattttcacacagtgagtgtatctatataattaatacccaggtcaggaaatacgatattactagcaccycagaagctccttgtgccctctctctgtcagagtgatctttttaaagggaaaatgtgatcatgcttaatgcctttcagttgcttcccattgctcttagaataaagaccagaaatcataatgtgatatttaagatcctggatgatgttactgtttttcctatgcaacttcatgttttttaaattatttttctcactttctgtattccagccctgataaccacctctcaattccttgaatgtggcatgctgttccctcttgctaaaaaattctatgtacacataccccttccgttcttgtccgtcagatttgagctcttcaaagttttcttggacatagcaagcttgatgaggtcccaaatacatcttatgtgctctcatatgctttattcatttgtatattattatttcccttatttttaagctaatgagtcaggtattacacctgttttgctcactgttgcttggtcatcagctagcatggtggctgggaaagattagtattcaatattcatacaataagtgaatatgagtagtttgggtttgttatgggatgaattatccatccccaccccccactcccacacacagacacccaactgatacactgaagattaaaattctaactgntagaacctagcaatgtaactgtatttggagatggggcctttaaaaaggtaatgaagataaaatgaagtcatatgggtggactccaattccatatgagtggtttccattaagaagagattagsacacagacacacagaaaggtaagaccatgtgaagacactggaggaagatggccatctacaagccaaagagatctacaggctttagaagaaaccaacactgctgacaccttgatcttggcctyctagaagtgtgagaaaataaattctgynctttcaactaccacaatctgtgatactttgctatggaagccctagyaaacttatatggattttggtattggnaaagtggggtgctggtgtaattaatacctaaaaatgtggaattggctttagaactagataatgggtagaggccagaagaagtatttgttagaaaaagcatagactgccttgaagagattgttggtagacatatggatgttgaaggtgattctggtgaagcttagaaaataggagagctgttgagaaagcttctgtcatcttagaggtatacatatgtcaccttgaataaatattggtagaaatatgaatgttaaaggtgtttctggtaggaactcaaacaaatgaggaatatattgttggaaactgagggaaaggcaatgcttattataatgtggcaaatagccaaattgtgttttgtggaaagtggatgaacttacaaagtgatgaacttgaatgtttagctgagatttctaagcaatgyattaaagatatggsctggtttcttcttgctgcttaaagtaagatgcaagaggagagagagaaatttaagaaggaattattaagccaaaagcaaccagagcctgaagattcggaaaattctcagtctatccatattgcaaaaatttagcatgttctggagggaacatcaaagttgttgcaagacaaccatttcctaaagcaattagggatatgtgacttgtggatccaatcagccatcttggcagcaactagcagaagccaggatagagatggggttatacctatggaaatgctgctggctggtaccgaagggaacagagggataaaaatgaaggaagtctgttggatttcttgagattctataaaatgggtcagtagagctatctggctgtgaacatgtgttcttcaagaagagggaagaatgaccctgaagattattgagaaggcaaagsggctactattgctaccacaggacagagggctcaggcctgacgagtcaacgcaggctacttcttagsgctgagggaggtgggctaccacactggtgggctcagaagacagggctgccacccctgttaggtgggaagatggagaatgaagctgaagaagattattcttgagccttaaaatctaatgggatttgcctttatacgtttcagacctgcttaggatccatcaccccttctttctgatttttttggaataggaatgtttatcctatgcctgtctcaccagtggtgtattttggaagcaaataacttgtctagtttcacaggttcatgctggagaagaattttgcctcagggtgaaaccttgagtatgcctgtacctgatctaaatgatatttagatgagatttggggcttagagttgatactgaagtgggtcaagactttggsgctgttgggatggagtggatgtgttttgtgtctgagaaggacatgaattttgaggggscagatggcagaattttaggggttgaattgtatgctctccaaatgtatataagttaaagtcctaactcctagtacctagaatgtgaccatatttggagatggggcctttaaaaaggtaaaaaaaaaaaaaaa

SEQ ID NO: 521 - DNA, 1816 bp, Homo sapiens
ggcacccagggtccggcctgcgccttcccgccaggcctggacactggttcaacacctgtgacttcatgtgtgcgcgccggccacacctgcagtcacacctgtagccccctctgccaagagatccataccgaggcagcgtcggtggctacaagccctcagtccacacctgtggacacctgtgacacctggccacacgacctgtggccgcggcctggcgtctgctgcgacaggagcccttacctcccctgttataacacctgaccgccacctaactgcccctgcagaaggagcaatggccttggctcctgagagggcagccccacgcgtgctgttcggagagtggctccttggagagatcagcagcggctgctatgaggggctgcagtggctggacgaggcccgcacctgtttccgcgtgccctggaagcacttcgcgcgcaaggacctgagcgaggccgacgcgcgcatcttcaaggcctgggctgtggcccgcggcaggtggccgcctagcagcaggggaggtggcccgccccccgaggctgagactgcggagcgcgccggctggaaaaccaacttccgctgcgcactgcgcagcacgcgtcgcttcgtgatgctgcgggataactcgggggacccggccgacccgcacaaggtgtacgcgctcagccgggagctgtgctggcgagaaggcccaggcacggaccagactgaggcagaggcccccgcagctgtcccaccaccacagggtgggcccccagggccattcttggcacacacacatgctggactccaagccccaggccccctccctgccccagctggtgacaagggggacctcctgctccaggcagtgcaacagagctgcctggcagaccatctgctgacagcgtcatggggggcagatccagtcccaaccaaggctcctggagagggacaagaagggcttcccctgactggggcctgtgctggaggcgaggccgcggccccagagtccccgcaccaggcagagccgtacctgtcaccctccccaagcgcctgcaccgcggtgcaagagcccagcccaggggcgctggacgtgaccatcatgtacaagggccgcacggtgctgcagaaggtggtgggacacccgagctgcacgttcctatacggccccccagacccagctgtccgggccacagacccccagcaggtagcattccccagccctgccgagctcccggaccagaagcagctgcgctacacggaggaactgctgcggcacgtggcccctgggttgcacctggagcttcgggggccacagctgtgggcccggcgcatgggcaagtgcaaggtgtactgggaggtgggcggacccccaggctccgccagcccctccaccccagcctgcctgctgcctcggaactgtgacacccccatcttcgacttcagagtcttcttccaagagctggtggaattccgggcacggcagcgccgtggctccccacgctataccatctacctgggcttcgggcaggacctgtcagctgggaggcccaaggagaagagcctggtcctggtgaagctggaaccctggctgtgccgagtgcacctagagggcacgcagcgtgagggtgtgtcttccctggatagcagcagcctcagcctctgcctgtccagcgccaacagcctctatgacgacatcgagtgcttccttatggagctggagcagcccgcctagaacccagtctaatgagaactccagaaagctggagcagcccacctagagctggccgcggccgcccagtctaataaaaagaactccagaacaaaaaaaaaa

SEQ ID NO: 522 - DNA, 14796 bp, Homo sapiens
tctagacatgcggatatattcaagctgggcacagcacagcagccccaccccaggcagcttgaaatcagagctggggtccaaagggaccacaccccgagggactgtgtgggggtcggggcacacaggccactgcttccccccgtctttctcagccattcctgaagtcagcctcactctgcttctcagggatttcaaatgtgcagagactctggcacttttgtagaagccccttctggtcctaacttacacctggatgctgtggggctgcagctgctgctcgggctcgggaggatgctgggggcccggtgcccatgagcttttgaagctcctggaactcggttttgagggtgttcaggtccaggtggacacctgggctgtccttgtccatgcatttgatgacattgtgtgcagaagtgaaaaggagttaggccgggcatgctggcttatgcctgtaatcccagcactttgggaggctgaggcgggtggatcacgaggtcaggagttcaataccagcctggccaagatggtgaaaccccgtctctactaaaaatacaaaaaaattagccgggcatggtggcgggcgcatgtaatcccagctactgggggggctgaggcagagaattgctggaacccaggagatggaggttgcagtgagccaagattgtgccactgcactgcactccagcctggcgacagagcaagactctgtctcaaaaaaaaaaaaaaaaagtgaaaaggagttgttcctttcctccctcctgagggcaggcaactgctgcggttgccagtggaggtggtgcgtccttggtctgtgcctgggggccaccccagcagaggccatggtggtgccagggcccggttagcgagccaatcagcaggacccaggggcgacctgccaaagtcaactggatttgataactgcagcgaagttaagtttcctgattttgatgattgtgttgtggttgtgtaagagaatgaagtatttcggggtagtatggtaatgccttcaacttacaaacggttcaggtaaaccacccatatacatacatatacatgcatgtgatatatacacatacagggatgtgtgtgtgttcacatatatgaggggagagagactaggggagagaaagtaggttggggagagggagagagaaaggaaaacaggagacagagagagagcggggagtagagagagggaaggggtaagagagggagaggaggagagaaagggaggaagaagcagagagtgaatgttaaaggaaacaggcaaaacataaacagaaaatctgggtgaagggtatatgagtattctttgtactattcttgcaattatcttttatttaaattgacatcgggccgggcgcagtggctcacatctgtaatcccagcactttgggaggccgaggcaggcagatcacttgaggtcaggagtttgagaccagcctggcaaacatggtgaaaccccatctctactaaaaatacaaaaattagcctggtgtggtggtgcatgcctttaatctcagctactcgggaggctgaggcaggagaatcgcttgaacccgtggcggggaggaggttgcagtgagctgagatcatgccactgcactccagcctgggcgatagagcgagactcagtttcaaataaataaataaacatcaaaataaaaagttactgtattaaagaatgggggcggggtgggaggggtggggagaggttgcaaaaataaataaataaataaataaaccccaaaatgaaaaagacagtggaggcaccaggcctgcgtggggctggagggctaataaggccaggcctcttatctctggccatagaaccagagaagtgagtggatgtgatgcccagctccagaagtgactccagaacaccctgttccaaagcagaggacacactgattttttttttaataggctgcaggacttactgttggtgggacgccctgctttgcgaagggaaaggaggagtttgccctgagcacaggcccccaccctccactgggctttccccagctcccttgtcttcttatcacggtagtggcccagtccctggcccctgactccagaaggtggccctcctggaaacccaggtcgtgcagtcaacgatgtactcgccgggacagcgatgtctgctgcactccatccctcccctgttcatttgtccttcatgcccgtctggagtagatgctttttgcagaggtggcaccctgtaaagctctcctgtctgactttttttttttttttagactgagttttgctcttgttgcctaggctggagtgcaatggcacaatctcagctcactgcaccctctgcctcccgggttcaagcgattctcctgcctcagcctcccgagtagttgggattacaggcatgcaccaccacgcccagctaatttttgtatttttagtagagacaaggtttcaccgtgatggccaggctggtcttgaactccaggactcaagtgatgctcctgcctaggcctctcaaagtgttgggattacaggcgtgagccactgcacccggcctgcacgcgttctttgaaagcagtcgagggggcgctaggtgtgggcagggacgagctggcgcggcgtcgctgggtgcaccgcgaccacgggcagagccacgcggcgggaggactacaactcccggcacaccccgcgccgccccgcctctactcccagaaggccgcggggggtggaccgcctaagagggcgtgcgctcccgacatgccccgcggcgcgccattaaccgccagatttgaatcgcgggacccgttggcagaggtggcggcggcggcatgggtgccccgacgttgccccctgcctggcagccctttctcaaggaccaccgcatctctacattcaagaactggcccttcttggagggctgcgcctgcaccccggagcgggtgagactgcccggcctcctggggtcccccacgcccgccttgccctgtccctagcgaggccactgtgactgggcctcgggggtacaagccgccctcccctccccgtcctgtccccagcgaggccactgtggctgggccccttgggtccaggccggcctcccctccctgctttgtccccatcgaggcctttgtggctgggcctcggggttccgggctgccacgtccactcacgagctgtgctgtcccttgcagatggccgaggctggcttcatccactgccccactgagaacgagccagacttggcccagtgtttcttctgcttcaaggagctggaaggctgggagccagatgacgaccccatgtaagtcttctctggccagcctcgatgggctttgttttgaactgagttgtcaaaagatttgagttgcaaagacacttagtatgggagggttgctttccaccctcattgcttcttaaacagctgttgtgaacggatacctctctatatgctggtgccttggtgatgcttacaacctaattaaatctcatttgaccaaaatgccttggggtggacgtaagatgcctgatgcctttcatgttcaacagaatacatcagcagaccctgttgttgtgaactcccaggaatgtccaagtgctttttttgagattttttaaaaaacagtttaattgaaatataacctacacagcacaaaaattaccctttgaaagtgtgcacttcacactttcggaggctgaggcgggcggatcacctgaggtcaggagttcaagacctgcctggccaacttggcgaaaccccgtctctactaaaaatacaaaaattagccgggcatggtagcgcacgcccgtaatcccagctactcgggaggctaaggcaggagaatcgcttgaacctgggaggcggaggttgcagtgagccgagattgtgccaatgcactccagcctcggcgacagagcgagactccgtcataaaaataaaaaattgaaaaaaaaaaaagaaagaaagcatatacttcagtgttgttctggatttttttcttcaagatgcctagttaatgacaatgaaattctgtactcggatggtatctgtctttccacactgtaatgccatattcttttctcacctttttttctgtcggattcagttgcttccacagctttaatttttttcccctggagaatcaccccagttgtttttctttttggccagaagagagtagctgttttttttcttagtatgtttgctatggtggttatactgcatccccgtaatcactgggaaaagatcagtggtattcttcttgaaaatgaataagtgttatgatattttcagattagagttacaactggctgtctttttggactttgtgtggccatgttttcattgtaatgcagttctggtaacggtgatagtcagttatacagggagactcccctagcagaaaatgagagtgtgagctagggggtcccttggggaacccggggcaataatgcccttctctgcccttaatccttacagtgggccgggcacggtggcttacgcctgtaataccagcactttgggaggccgaggcgggcggatcacgaggtcaggagatcgagaccatcttggctaatacggtgaaaccccgtctccactaaaaatacaaaaaattagccgggcgtggtggtgggcgcctgtagtcccagctactcgggaggctgaggcaggagaatggcgtgaacccaggaggcggagcttgcagtgagccgagattgcaccactgcactccagcctgggcgacagaatgagactccgtctcaaaaaaaaaaaaaaaagaaaaaaatctttacagtggattacataacaattccagtgaaatgaaattacttcaaacagttccttgagaatgttggagggatttgacatgtaattcctttggacatataccatgtaacacttttccaactaattgctaaggaagtccagataaaatagatacattagccacacagatgtggggggagatgtccacagggagagagaaggtgctaagaggtgccatatgggaatgtggcttgggcaaagcactgatgccatcaacttcagacttgacgtcttactcctgaggcagagcagggtgtgcctgtggagggcgtggggaggtggcccgtggggagtggactgccgctttaatcccttcagctgcctttccgctgttgttttgatttttctagagaggaacataaaaagcattcgtccggttgcgctttcctttctgtcaagaagcagtttgaagaattaacccttggtgaatttttgaaactggacagagaaagagccaagaacaaaattgtatgtattgggaataagaactgctcaaaccctgttcaatgtctttagcactaaactacctagtccctcaaagggactctgtgttttcctcaggaagcattttttttttttttctgagatagagtttcactcttgttgcccaggctggagtgcaatggtgcaatcttggctcactgcaacctctgcctctcgggttcaagtgattctcctgcctcagcctcccaagtaactgggattacagggaagtgccaccacacccagctaatttttgtatttttagtagagatggggtttcaccacattgcccaggctggtcttgaactcctgacctcgtgattcgcccaccttggcctcccaaagtgctgggattacaggcgtgaaccaccacgcctggcttttttttttttgttctgagacacagtttcactctgttacccaggctggagtagggtggcctgatctcggatcactgcaacctccgcctcctgggctcaagtgatttgcctgcttcagcctcccaagtagccgagattacaggcatgtgccaccacacccaggtaatttttgtatttttggtagagacgaggtttcaccatgttggccaggctggttttgaactcctgacctcaggtgatccacccgcctcagcctcccaaagtgctgagattataggtgtgagccaccacacctggcctcaggaagtatttttatttttaaatttatttatttatttgagatggagtcttgctctgtcgcccaggctagagtgcagcgacgggatctcggctcactgcaagctccgccccccaggttcaagccattctcctgcctcagcctcccgagtagctgggactacaggcgcccgccaccacacccggctaatttttttgtatttttagtagagacgggttttcaccgtgttagccaggagggtcttgatctcctgacctcgtgatctgcctgcctcggcctcccaaagtgctgggattacaggtgtgagccaccacacccggctatttttatttttttgagacagggactcactctgtcacctgggctgcagtgcagtggtacaccatagctcactgcagcctcgaactcctgagctcaagtgatcctcccacctcatcctcacaagtaattgggactacaggtgcaccccaccatgcccacctaatttatttatttatttatttatttattttcatagagatgagggttccctgtgttgtccaggctggtcttgaactcctgagctcacgggatccttttgcctgggcctcccaaagtgctgagattacaggcatgagccaccgtgcccagctaggaatcatttttaaagcccctaggatgtctgtgtgattttaaagctcctggagtgtggccggtataagtatataccggtataagtaaatcccacattttgtgtcagtatttactagaaacttagtcatttatctgaagttgaaatgtaactgggctttatttatttatttatttatttatttatttttaatttttttttttgagacgagtctcactttgtcacccaggctggagtgcagtggcacgatctcggctcactgcaacctctgcctcccggggtcaagcgattctcctgccttagcctcccgagtagctgggactacaggcacgcaccaccatgcctggctaatttttgtatttttagtagacggggtttcaccatgctggccaagctggtctcaaactcctgaccttgtgatctgcccgctttagcctcccagagtgctgggattacaggcatgagccaccatgcgtggtctttttaaaattttttgattttttttttttttgagacagagccttgctctgtcgcccaggctggagtgcagtggcacgatctcagctcactacaagctccgcctcccgggttcacgccattcttctgcctcagcctcctgagtagctgggactacaggtgcccaccaccacgcctggctaattttttttggtatttttattagagacaaggtttcatcatgttggccaggctggtctcaaactcctgacctcaagtgatctgcctgcctcggcctcccaaagcgctgagattacaggtgtgatctactgcgccaggcctgggcgtcatatattcttatttgctaagtctggcagccccacacagaataagtactgggggattccatatccttgtagcaaagccctgggtggagagtcaggagatgttgtagttctgtctctgccacttgcagactttgagtttaagccagtcgtgctcatgctttccttgctaaatagaggttagaccccctatcccatggtttctcaggttgcttttcagcttgaaaattgtattcctttgtagagatcagcgtaaaataattctgtccttatatgtggctttattttaatttgagacagagtgtcactcagtcgcccaggctggagtgtggtggtgcgatcttggctcactgcgacctccacctcccaggttcaagcgattctcgtgcctcaggctcccaagtagctgagattataggtgtgtgccaccaggcccagctaacttttgtatttttagtagagacagggttttgccatgttggctaagctggtctcgaactcctggcctcaagtgatctgcccgccttggcatcccaaagtgctgggattacaggtgtgaaccaccacacctggcctcaatatagtggcttttaagtgctaaggactgagattgtgttttgtcaggaagaggccagttgtgggtgaagcatgctgtgagagagcttgtcacctggttgaggttgtgggagctgcagcgtgggaactggaaagtgggctggggatcatctttttccaggtcaggggtcagccagcttttctgcagcgtgccatagaccatctcttagccctcgtgggtcagagtctctgttgcatattgtcttttgttgtttttcacaaccttttagaaacataaaaagcattcttagcccgtgggctggacaaaaaaaggccatgacgggctgtatggatttggcccagcaggcccttgcttgccaagccctgttttagacaaggagcagcttgtgtgcctggaaccatcatgggcacaggggaggagcagagtggatgtggaggtgtgagctggaaaccaggtcccagagcgctgagaaagacagagggtttttgcccttgcaagtagagcaactgaaatctgacaccatccagttccagaaagccctgaagtgctggtggacgctgcggggtgctccgctctagggttacagggatgaagatgcagtctggtagggggagtccactcacctgttggaagatgtgattaagaaaagtagactttcagggccgggcatggtggctcacgcctgtaatcccagcactttgggaggccgaggcgggtggatcacgaggtcaggagatcgagaccatcctggctaacatggtgaaaccccgtctttactaaaaatacaaaaaattagctgggcgtggtggcgggcgcctgtagtcccagctactcgggaggctgaggcaggagaatggcgtgaacctgggaggtggagcttgctgtgagccgagatcgcgccactgcactccagcctgggcgacagagcgagactccgtctcaaaaaaaaaaaaaaaagtaggctttcatgatgtgtgagctgaaggcgcagtaggcagaagtagaggcctcagtccctgcaggagacccctcggtctctatctcctgatagtcagacccagccacactggaaagaggggagacattacagcctgcgagaaaagtagggagatttaaaaactgcttggcttttattttgaactgttttttttgtttgtttgttttccccaattcagaatacagaatacttttatggatttgtttttattactttaattttgaaacaatataatcttttttttgttgtttttttgagacagggtcttactctgtcacccaggctgagtgcagtggtgtgatcttggctcacctcagcctcgaccccctgggctcaaatgattctcccacctcagcttcccaagtagctgggaccacaggtgcgtgtgttgcgctatacaaatcctgaagacaaggatgctgttgctggtgatgctggggattcccaagatcccagatttgatggcaggatgcccctgtctgctgccttgccagggtgccaggagggcgctgctgtggaagctgaggcccggccatccagggcgatgcattgggcgctgattcttgttcctgctgctgcctcggtgcttagcttttgaaacaatgaaataaattagaaccagtgtgaaaatcgatcagggaataaatttaatgtggaaataaactgaacaacttagttcttcataagagtttacttggtaaatacttgtgatgaggacaaaacgaagcactagaaggagaggcgagttgtagacctgggtggcaggagtgttttgtttgttttctttggcagggtcttgctctgttgctcaggctggagtacagtggcacaatcacagctcactatagcctcgacctcctggactcaagcaatcctcctgcctcagcctcccagtagctgggactacaggcgcatgccaccatgcctggctaattttaaatttttttttttctcttttttgagatggaatctcactctgtcgcccaggctggagtgcagtggcgtgatctcggctgacggcaagctccgcctcccaggttcactccattcgcctgcctcagcctcccaagtagctgggactacaggcgctgggattacaaacccaaacccaaagtgctgggattacaggcgtgagccactgcacccggcctgttttgtctttcaatagcaagagttgtgtttgcttcgcccctacctttagtggaaaaatgtataaaatggagatattgacctccacattggggtggttaaattatagcatgtatgcaaaggagcttcgctaatttaaggcttttttgaaagagaagaaactgaataatccatgtgtgtatatatattttaaaagccatggtcatctttccatatcagtaaagctgaggctccctgggactgcagagttgtccatcacagtccattataagtgcgctgctgggccaggtgcagtggcttgtgcctgaatcccagcactttgggaggccaaggcaggaggattcattgagcccaggagttttgaggcgagcctgggcaatgtggccagacctcatctcttcaaaaaatacacaaaaaattagccaggcatggtggcacgtgcctgtagtctcagctactcaggaggctgaggtgggaggatcactttgagccttgcaggtcaaagctgcagtaagccatgatcttgccactgcattccagcctggatgacagagcgagaccctgtctctaaaaaaaaaaaaaaccaaacggtgcactgttttcttttttcttatcaatttattatttttaaattaaattttcttttaataatttataaattataaatttatattaaaaaatgacaaatttttattacttatacatgaggtaaaacttaggatatataaagtacatattgaaaagtaattttttggctggcacagtggctcacacctgtaatcccagcactttgggaggccgtggcgggcagatcacatgagatcatgagttcgagaccaacctgaccaacatggagagaccccatctctactaaaaatacaaaattagccggggtggtggcgcatgcctgtaatcccagctactcgggaggctgaggcaggagaatctcttgaacccgggaggcagaggttgcggtgagccaagatcgtgcctttgcacaccagcctaggcaacaagagcgaaagtccgtctcaaaaaaaaagtaattttttttaagttaacctctgtcagcaaacaaatttaacccaataaaggtctttgttttttaatgtagtagaggagttagggtttataaaaaatatggtagggaagggggtccctggatttgctaatgtgattgtcatttgccccttaggagagagctctgttagcagaatgaaaaaattggaagccagattcagggagggactggaagcaaaagaatttctgttcgaggaagagcctgatgtttgccagggtctgtttaactggacatgaagaggaaggctctggactttcctccaggagtttcaggagaaaggtagggcagtggttaagagcagagctctgcctagactagctggggtgcctagactagctggggtgcccagactagctggggtgcctagactagctgggtactttgagtggctccttcagcctggacctcggtttcctcacctgtatagtagagatatgggagcacccagcgcaggatcactgtgaacataaatcagttaatggaggaagcaggtagagtggtgctgggtgcataccaagcactccgtcagtgtttcctgttattcgatgattaggaggcagcttaaactagagggagttgagctgaatcaggatgtttgtcccaggtagctgggaatctgcctagcccagtgcccagtttatttaggtgctctctcagtgttccctgattgttttttcctttgtcatcttatctacaggatgtgactgggaagctctggtttcagtgtcatgtgtctattctttatttccaggcaaaggaaaccaacaataagaagaaagaatttgaggaaactgcgaagaaagtgcgccgtgccatcgagcagctggctgccatggattgaggcctctggccggagctgcctggtcccagagtggctgcaccacttccagggtttattccctggtgccaccagccttcctgtgggccccttagcaatgtcttaggaaaggagatcaacattttcaaattagatgtttcaactgtgctcctgttttgtcttgaaagtggcaccagaggtgcttctgcctgtgcagcgggtgctgctggtaacagtggctgcttctctctctctctctcttttttgggggctcatttttgctgttttgattcccgggcttaccaggtgagaagtgagggaggaagaaggcagtgtcccttttgctagagctgacagctttgttcgcgtgggcagagccttccacagtgaatgtgtctggacctcatgttgttgaggctgtcacagtcctgagtgtggacttggcaggtgcctgttgaatctgagctgcaggttccttatctgtcacacctgtgcctcctcagaggacagtttttttgttgttgtgtttttttgttttttttttttggtagatgcatgacttgtgtgtgatgagagaatggagacagagtccctggctcctctactgtttaacaacatggctttcttattttgtttgaattgttaattcacagaatagcacaaactacaattaaaactaagcacaaagccattctaagtcattggggaaacggggtgaacttcaggtggatgaggagacagaatagagtgataggaagcgtctggcagatactccttttgccactgctgtgtgattagacaggcccagtgagccgcggggcacatgctggccgctcctccctcagaaaaaggcagtggcctaaatcctttttaaatgacttggctcgatgctgtgggggactggctgggctgctgcaggccgtgtgtctgtcagcccaaccttcacatctgtcacgttctccacacgggggagagacgcagtccgcccaggtccccgctttctttggaggcagcagctcccgcagggctgaagtctggcgtaagatgatggatttgattcgccctcctccctgtcatagagctgcagggtggattgttacagcttcgctggaaacctctggaggtcatctcggctgttcctgagaaataaaaagcctgtcatttcaaacactgctgtggaccctactgggtttttaaaatattgtcagtttttcatcgtcgtccctagcctgccaacagccatctgcccagacagccgcagtgaggatgagcgtcctggcagagacgcagttgtctctgggcgcttgccagagccacgaaccccagacctgtttgtatcatccgggctccttccgggcagaaacaactgaaaatgcacttcagacccacttatttatgccacatctgagtcggcctgagatagacttttccctctaaactgggagaatatcacagtggtttttgttagcagaaaatgcactccagcctctgtactcatctaagctgcttatttttgatatttgtgtcagtctgtaaatggatacttcactttaataactgttgcttagtaattggctttgtagagaagctggaaaaaaatggttttgtcttcaactcctttgcatgccaggcggtgatgtggatctcggcttctgtgagcctgtgctgtgggcagggctgagctggagccgcccctctcagcccgcctgccacggcctttccttaaaggccatccttaaaaccagaccctcatggctgccagcacctgaaagcttcctcgacatctgttaataaagccgtaggcccttgtctaagcgcaaccgcctagactttctttcagatacatgtccacatgtccatttttcaggttctctaagttggagtggagtctgggaagggttgtgaatgaggcttctgggctatgggtgaggttccaatggcaggttagagcccctcgggccaactgccatcctggaaagtagagacagcagtgcccgctgcccagaagagaccagcaagccaaactggagcccccattgcaggctgtcgccatgtggaaagagtaactcacaattgccaataaagtctcatgtggttttatctactttttttttctttttctttttttttgagacaaggccttgccctcccaggctggagtgcagtggaatgaccacagctcaccgcaacctcaaattcttgcgttcaagtgaacctcccactttagcctcccaagtagctgggactacaggcgcacgccatcacacccggctaattgaaaaatttttttttttgtttagatggaatctcactttgttgcccaggctggtctcaaactcctgggctcaagtgatcatcctgcttcagcgtccgacttgttggtattataggcgtgagccactgggcctgacctagctaccattttttaatgcagaaatgaagacttgtagaaatgaaataacttgtccaggatagtcgaataagtaacttttagagctgggatttgaacccaggcaatctggctccagagctgggccctcactgctgaaggacactgtcagcttgggagggtggctatggtcggctgtctgattctagggagtgagggctgtctttaaagcaccccattccattttcagacagctttgtcagaaaggctgtcatatggagctgacacctgcctccccaaggcttccatagatcctctctgtacattgtaaccttttattttgaaatgaaaattcacaggaagttgtaaggctagtacaggggatcc

SEQ ID NO: 523 - DNA, 494 bp, Homo sapiens
  misc_feature (1)...(494): n=a,t,g or c
ctttgaagtatttattgttattttctttgacttatgggaaaactgggacacaggaagacaggtaaattacccaacctcacacgttaagtcagaactgggagccataattttgtatccctggtataaatagacaatctctcgaagaaatgaagagatgaccatagaaaaacatccgagatatctccagctctaaaatcctttgtttcaatgttgtttggcatatgttatctttggaatttagtgtctgagcctctgtctgttactgtagtatttaaaatgcatgtattataatcatataatcataactgctgttaattcttgattatatacctagggacaatgtgtaatgtaagattactaattgggttctgcccaatctccttttcagattttattaggaaaaaaaaataaacctcctggatcggagacaatgtattaaatcagaagtgtaaactgccagttcnatatagcatgaaatgaaaagacagctaatt

SEQ ID NO: 524 - DNA, 432 bp, Homo sapiens
  misc_feature (1)...(432): n=a,t,g or c
ggcccatatccagtatggcggttatagatgtaaaaatgctatcaggatttactccaaccatgtcatccattgaagagcttgaaaacaagggccaagtgatgaagactgaagtcaagaatgaccatgttcttttctacttggaaaatgttttgggtcgagcagacagtttcactttttctgctgagcagagcaaccttgtgttcaacattcagccagccccaggcatggtctacgattagtacgaaaaagaagaatatgccctagctttttaccacatcaacagnagcncaagtttccgagtgagacaaaagcaattactggnagaagtaaagaaattttattacgtcataaaccattgaaaacacatctngtaagaaaatgaaancctgantaagataggacaaatagntggngaaagaaaagtctcttggt

SEQ ID NO: 525 - DNA, 484 bp, Homo sapiens
  misc_feature (1)...(484): n=a,t,g or c
gccctntctctctcctctttctcccctttcccatctccctctgccttcccctggcactctctctctagaacgggcagctgctgctgagtngggaggagccctggcagtgggggctgtgcgtcggtgctcagtgccatggncttcactggggcaggaatcgccgcgtcctccatagcagccaagatgatgtccgcagcagccattgccaacgggggtggtgtttctgcggggagcctggtggctactctgcagtccgtgggggcagctggactctccacatcatccaacatcctcctggcctctgttgggtcagtgttgggggcctgcttggggaattcaccttcttcttctctcccagctgaacccgaggctaaagaagatgaggcaagagaaaatgtaccccaaggtgaacctccaaaacccccactcaagtcagagaaacatgaggaataaaggtcacatgcagatgcatcaaaaaaaaaaa

SEQ ID NO: 526 - DNA, 439 bp, Homo sapiens
actttggttccagcatcctgtccagcaaagaagcaatcagccaaaatgatacctggaggcttatctgaggccaaacccgccactccagaaatccaggagattgttgataaggttaaaccacagcttgaagaaaaaacaaatgagacttatggaaaattggaagctgtgcagtataaaactcaagttgttgctggaacaaattactacattaaggtacgagcaggtgataataaatatatgcacttgaaagtattcaaaagtcttcccggacaaaatgaggacttggtacttactggataccaggttgacaaaaacaaggatgacgagctgacgggcttttagcagcatgtacccaaagtgttctgattccttcaactggctactgagtcatgatccttgctgataaatataaccatcaataaagaagcattcttttcca

SEQ ID NO: 527 - DNA, 2492 bp, Homo sapiens
cccgggcgggcgagaggctctcaactgggcgggaaggtgcgggaaggtgcggaaaggttcgcgaaagttcgcggcggcgggggtcgggtgaggcgcaaaaggataaaaagcccgtggaagcggagctgagcagatccgagccgggctggctgcagagacaccgcagggagagcctcactgctgagcgcccctcgacggcggacgggcagcagcctccgtggcctccagcatccgacaagaagcttcagccatgcaggccccacgggagctcgcggtgggcatcgacctgggcaccacctactcgtgcgtgggcgtgtttcagcagggccgcgtggagatcctggccaacgaccagggcaaccgcaccacgcccagctacgtggccttcaccgacaccgagcggctggtcggggacgcggccaagagccaggcggccctgaacccccacaacaccgtgttcgatgccaagcggctgatcgggcgcaagttcgcggacaccacggtgcagtcggacatgaagcactggcccttccgggtggtgagcgagggcggcaagcccaaggtgccggtatcgtaccgcggggaggacaagacgttctaccccgaggagatctcgtccatggtgctgagcaagatgaaggagacggccgaggcgtacctgggccagcccgtgaagcacgcagtgatcaccgtgcccgcctatttcaatgactcgcagcgccaggccaccaaggacgcgggggccatcgcggggctcaacgtgttgcggatcatcaatgagcccacggcagctgccatcgcctatgggctggaccggcggggcgcgggagagcgcaacgtgctcatttttgacctgggtgggggcaccttcgatgtgtcggttctctccattgacgctggtgtctttgaggtgaaagccactgctggagatacccacctgggaggagaggacttcgacaaccggctcgtgaaccacttcatggaagaattccggcggaagcatgggaaggacctgagcgggaacaagcgtgccctcggcaggctgcgcacagcctgtgagcgcgccaagcgcaccctgtcctccagcacccaggccaccctggagatagactccctgttcgagggcgtggacttctacacgtccatcactcgtgcccgctttgaggaactgtgctcagacctcttccgcagcaccctggagccggtggagaaggccctgcgggatgccaagctggacaaggcccagattcatgacgtcgtcctggtggggggctccactcgcatccccaaggtgcagaagttgctgcaggacttcttcaacggcaaggagctgaacaagagcatcaaccctgatgaggctgtggcctatggggctgctgtgcaggcggccgtgttgatgggggacaaatgtgagaaagtgcaggatctcctgctgctggatgtggctcccctgtctctggggctggagacagcaggtggggtgatgaccacgctgatccagaggaacgccactatccccaccaagcagacccagactttcaccacctactcggacaaccagcctggggtcttcatccaggtgtatgagggtgagagggccatgaccaaggacaacaacctgctggggcgttttgaactcagtggcatccctcctgccccacgtggagtcccccagatagaggtgacctttgacattgatgctaatggcatcctgagcgtgacagccactgacaggagcacaggtaaggctaacaagatcaccatcaccaatgacaagggccggctgagcaaggaggaggtggagaggatggttcatgaagccgagcagtacaaggctgaggatgaggcccagagggacagagtggctgccaaaaactcgctggaggcccatgtcttccatgtgaaaggttctttgcaagaggaaagccttagggacaagattcccgaagaggacaggcgcaaaatgcaagacaagtgtcgggaagtccttgcctggctggagcacaaccagctggcagagaaggaggagtatgagcatcagaagagggagctggagcaaatctgtcgccccatcttctccaggctctatggggggcctggtgtccctgggggcagcagttgtggcactcaagcccgccagggggaccccagcaccggccccatcattgaggaggttgattgaatggcccttcgtgataagtcagctgtgactgtcagggctatgctatgggccttctagactgtcttctatgatcctgcccttcagagatgaactttccctccaaagctagaactttcttcccaggataactgaagtcttttgactttttgcggggagggcggttcatcctcttctgcttcaaataaaaagtcattaatttattaaaacttgtgtggcactttaacattgctttcacctatattttgtgtactttgttacttgcatgtatgaattttgttatgtaaaatatagttatagacctaaataagct

SEQ ID NO: 528 - DNA, 1364 bp, Homo sapiens
aaaatcaggaacttgtgctggccctgcaatgtcaagggagggggctcacccagggctcctgtagctcagggggcaggcctgagccctgcacccgccccacgaccgtccagcccctgacgggcaccccatcctgaggggctctgcattggcccccaccgaggcaggggatctgaccgactcggagcccggctggatgttacaggcgtgcaaaatggaagggtttcccctcgtcccccctccatcagaagacctggtgccctatgacacggatctataccaacgccaaacgcacgagtattacccctatctcagcagtgatggggagagccatagcgaccattactgggacttccacccccaccacgtgcacagcgagttcgagagcttcgccgagaacaacttcacggagctccagagcgtgcagcccccgcagctgcagcagctctaccgccacatggagctggagcagatgcacgtcctcgatacccccatggtgccaccccatcccagtcttggccaccaggtctcctacctgccccggatgtgcctccagtacccatccctgtccccagcccagcccagctcagatgaggaggagggcgagcggcagagccccccactggaggtgtctgacggcgaggcggatggcctggagcccgggcctgggctcctgcctggggagacaggcagcaagaagaagatccgcctgtaccagttcctgttggacctgctccgcagcggcgacatgaaggacagcatctggtgggtggacaaggacaagggcaccttccagttctcgtccaagcacaaggaggcgctggcgcaccgctggggcatccagaagggcaaccgcaagaagatgacctaccagaagatggcgcgcgcgctgcgcaactacggcaagacgggcgaggtcaagaaggtgaagaagaagctcacctaccagttcagcggcgaagtgctgggccgcgggggcctggccgagcggcgccacccgccccactgagcccgcagcccccgccggccccgccaggcctccccgctggccatagcattaagccctcgcccggcccggacacagggaggacgctcccggggcccagaggcaggactgtggcgggccgggctccgtcacccgcccctccccccactccaggccccctccacatcccgcttcgcctccctccaggactccaccccggctcccgacgccagctgggcgtcagacccaccggcaaccttgcagaggacgacccggggtactgccttgggagtctcaagtccgtatgtaaatcagatctcccctctcacccctcccacccattaacctcctcccaaaaaacaagtaaagttattctcaatcc

SEQ ID NO: 529 - DNA, 1017 bp, Homo sapiens
  misc_feature (1)...(1017): n=a,t,g or c
gaattccactttaaccgctacctcactcgccgcaggcgcatagagatcgccaacaacttgtgtctcaatgagagacagatcaagatctggttccagaaccgcaggatgaagtggaacaaagattccaaaatgaaaagcaaagaggcactttagaggcaggggggaggcccgcagagcgcagcccctagccggttcctgtccctgcgcctttccttttcncctttcctctctatatttcgggtcgggggcaggtgctggagcactgggctcccggncccnacacagacaaaagcncttttccttggcattccgcatccctaccgacccagggttcccgcggggctgtcggcgctgcccatctcccctcagctcggctcagctcggtacccggggcccagggcaagctccgcaggacttccccggagntgcggcgtacaggctggcgcagaacgaaccttggcctgggcgtatctccggctcccagcctcagcgcggccctcccgagttaaggtgggcccggcccgcgnccacaggaccctcgccggaccctctaacctcgccctctcctttgttcccggctggacggnttagacagccaaaggntggcgagagtctggccctagactcggggtgcttccttgtagcgactaaactagattttcacttatgaatgatttgcatatgaaaggagagcatcggcctagggncccacagttgctctatgctttccaaaccttatctccacaacctctnnnncccaaaacccgggaacctncccagcctgcgcctgctgcatgccctctcaggccggcagccccagcctgctagctagctcaactagtggggtttcctggcactggaccccagcaagtggtcctagaggccctttgctgtcccatagtccctgccacgaatttctgtgccctcctgacccattgctgttgtcnaactatttattgactctgggtccttcctgaaactatattttgtcatatcaaataaagagagaacaggact

SEQ ID NO: 530 - DNA, 273 bp, Homo sapiens
  misc_feature (1)...(273): n=a,t,g or c
cctttttgagttgttttgtttttatttttaaatgaagtttccatctgtacacgttaagaaaataaacaaaacaacaggaagccattctctgtgtatcctccttggagcaggaaggatggatctgccgatancgaccaacagcacacagccagggctcatgggagtgagtgcccgtcacctcacgaaggtcatgggcctaaaacatacggaggctccataagaaaatgctccagctggctttgcagtcatgcataaaggtgaggacacttaaat

SEQ ID NO: 531 - DNA, 480 bp, Homo sapiens
taaacaaccaacatttattttctcacagtcctggagattaaaagtccaagatcaaggtgctggcagggctggttcctggtgaggtctctcctcctggcttgcagatggcagcattcttgttgtgtccttacacagcatttcctctgtgcacatgtggagagacaaacctctggtgtctcttcctcttataaggacactagtcctatgggattagggcctaactcttatggcctaacttaaccttagtttcttaaaggccttatgtccaaatacagtcatgttggggtttaggacttcaacaagtaaatttggtggtggtagaggccagcatttggtggtgctggtgggaacacaattcagaactgaattcacaattcaattcacagtggactcttgtgaataaagtataaaatttaaccagcattccactttaacaatgcataaaaatagtccctaaatttgggttatgagccatcttaa

SEQ ID NO: 532 - DNA, 437 bp, Homo sapiens
ttttaaatatttaagagtttatttgagcagtgatccatgaattgggcagctccaagccagaagtggctagggagctccccagagagaacatgaggaggaggctttttaggacaaatagataaaagcaaagataatatttcattggttacagttatacagttacacagttatacagttgccttatttggtctatcccatgaggaagtcctagttactaattacgtttttgttggctgcttctgattggttgagcttaagttctgtgtttctttaacataggcatttacaagaaataccacaaataaagtttcagacatgcttgcaaatcaagcaaggttaaggtcacttagggggcccaactggctctgtctgctcaaggattcttctggcctcgtctccattttacatgaactggttgcataaataaacacagagta

SEQ ID NO: 533 - DNA, 456 bp, Homo sapiens
  misc_feature (1)...(456): n=a,t,g or c
tttttttttttttttttaatagaacaggtcaagataaggctttatttctatagaaatgatgctttgacaatagtttggcttggtgtaaggctcacaaaagaaaatcacatgtaccatgtgtgggttaagcggtttgattcacactgaaccaggccagcccagttgccctctgctgtgtccacccgtggagtggagctgtgtcacagccatcacactggtaaactgctgtagctggtttaccaggctttctcttgccctgacagtacaggtgaagcctgtaaataaatcttctgctatctttgtgaacttaaccaaatcccagttaccttatttaaatggcaatagatctgttttcccttaaactagaaaccttaattacctgtattcctacctccagctcaacccatatatttgcanctttccagtaagcaggttttgtattttccatcgccccct

SEQ ID NO: 534 - DNA, 443 bp, Homo sapiens
  misc_feature (1)...(443): n=a,t,g or c
tttttctttctttttggctgtttttagttttttcttgatttcaaatcttcttttcaacacctccctcttctctatgcgattgaacagttcttgctctctctctttctctgtcatctgttccagacgggccctgtcttcctcatctcccatgaggtcttctccatagccatcatggaactcttcatcttctgaggaagagtctgaatctgaactggaagaggagctgttgctgtcagagtctgacacttcaccttcctcaggggctgagctctcagctgaactgtctttgtctgaactgcctgaggaggcagttttgttggcctgtttcttcatggttcctttcttctctatttttctggcttttcctttcttcttatttttatngctcccaaatgtccactcatcgtcactgtcagacgtctccgagtctgacgaaggctgca

SEQ ID NO: 535 - DNA, 261 bp, Homo sapiens
gagggaaagacaaaacgtatttattccaggccaggtcttaaaatgcacactgcacggttccctgttgttatcagcaccagtaaggaaagaacgtgccttaacggcagccccacccagagcctgctgcgtggctgctgtgaggctccccatgaatccacgcagtcttcttcctcactggtgcagttggtgaggttttctaccctcacagcaaagggatccttaactataaattcacggtatgcagagaagaggacagaatct

SEQ ID NO: 536 - DNA, 318 bp, Homo sapiens
  misc_feature (1)...(318): n=a,t,g or c
ttttttttttttaccagtcaagcactttttttatttaaaaaaaaaaaaaggaaagaagtcaaatggtaaagtatatagcctacacatgctacagctagttgttctcacccctcccctcacatcctatatactcatttatttaatgtgttaaaggaaacaaaaaccaccaccggaatgccaatttgccaagagggtagagtaagtgtggggatctccagcgtcatcctatgagcagacacgaggtggtgggcagtgccnttggttcctggagggaggtaagaaatggcctgttacttggaagctccccaaagcaggaaa

SEQ ID NO: 537 - DNA, 518 bp, Homo sapiens
  misc_feature (1)...(518): n=a,t,g or c
aaacattgaaaattttattttcacaggggatttgcataaaaagaacattatttttgttctgtgtatatataagtatttttgtttccttaacttgtttctgttgcccacacacaactaggagaagatgcttttctttattttggtttggccaaagatgctaatggttaaattatgaaggactttgttttacttatgttaagtggtgaaaactgtagttcttaatctatgaagaattctctaggtggctatacaagaaaaatacaaaaagttaggaaaacatgtaaacgtaagttatgaggtatttcatagatacagtgcccatacaaattctcttcctacnattttcaactgccagatctctgctttagtctttttcctatatttggagaaacagaagagttgacataaaagtcccttgaggatgtgaggggtgccgtagtttacagcagggtcagaaaatgacngtaatanagcatatttacatggttntggataggaaccaaatattcctaaaaagt

SEQ ID NO: 538 - DNA, 465 bp, Homo sapiens
  misc_feature (1)...(465): n=a,t,g or c
tttttttttttttttttctaaatgaagtgcttttaattttcagaccaaacatttttaatataaaaacattttgataatatacaaacagcaatcacaacagcatccacatggcagcaaggggaccagggcacagagngggggagcgggctggggagggacagttttcagggtcccagttgcttccctggcttgaaatcaccctggtcctagcagaggacaggttaaggctgccagaggangngggtccctgacctgggcccggagacagactgcccaggcaggccctctgataccatcttccaaccatggcagcctccaggaaaagccagatccatttaggagataacaggaaggtggctgtgattgacaggaaaggcaacatggttcctcagcatcctgctgatcacacctctgggaggggctgctggattgaagaggacctaagaatcttcctgggagcaggac

SEQ ID NO: 539 - DNA, 350 bp, Homo sapiens
ttttgtttttttccaacaatatttgtaccgtttttatttgtaaaaataaccatctgaatgcatttccatagtatattacagttaagtacttcattacgttattagagcattcagtagttgcaaaagtattaaactgtgcttgagaagattcagattgtttcaaagtcattcactgaactaaaagtcattttccccatttttacagtcatgacatttaccagagtcattcaactccaatttacataagaaaacattatagacaaaatcccactgaaatcatcaaacaatattttatgctgttacaaatatgttatgcaaaatataacactggcaccagatttgtatcatcg

SEQ ID NO: 540 - DNA, 264 bp, Homo sapiens
tctgctcgctgctcttcgccattcttctcgccttcctcctcgccatcgcctacttgatcgttaaagagttgcatgctgagaatttgaaaaatgaagatgatgtagacactggactattaggattctggactctacttataatatccctaactgctggattctcctgttgcagcttttcttggacagtgacttactttgattcttttgaaccaggaatgtttcctcctactcctctttcacctgccaggttcaagaaactgactg

SEQ ID NO: 541 - DNA, 464 bp, Homo sapiens
gttattgtttttttttttttctactactaattcctagtggtgcacaacgagtttctgagaacacagtaataacgccaaagtagcagtgcatctgagaaacataatttttacctcgttgctttcccaaaaataaatatctcagtcatggaaaacactgtttatttgaaaacaatgagacctcaaatatgaaatatagttaacaatgacattgacactgttgctagcactttcccctaaaccacccgtaagtcttggacgcatgtgcatgcagcacacacacacacacacaaaaaccaaaaacaaagccaaaaaaaaaaaaatcccaaacacaacaatccatgattgttcaatgactcctgatgccgggatgacaggctgttaaaagaatttgtctcccacaatatctctggagtgggcacaaagccatcacctgttagtgatcacagacattcagttaacctgtc

SEQ ID NO: 542 - DNA, 376 bp, Homo sapiens; identical to SEQ ID NO: 164

SEQ ID NO: 543 - DNA, 375 bp, Homo sapiens
tttttggtttggcatagtttattacaattagtgtgcgcataaaaccatgtaaactctacaaagtaaaccacttcccctccacactaaccagcagctagtctgccatgaccttccagcacccccattattttaacatatatacatttcacaggatgtaataaccacacaaatagggttataatacattcttcagggaaaaaaatttttggtccatattttctattaaaaaaacacacacacttccctctttggcaaaagaggttaaatctcccatagttaactcacaaaagaaactcaaataaaaactactgagcatgaggtacagctgatgtctggactgttctggaattacagacgcctccttgaggggaaaat

SEQ ID NO: 544 - DNA, 418 bp, Homo sapiens; identical to SEQ ID NO: 167

SEQ ID NO: 545 - DNA, 385 bp, Homo sapiens
ctctgtacagtttttaattttttattttttgatgtttgttgttcagatgaatgacacactcaagttacaaaaatggggccttaaaagaagcacattgtacaatgaacaagcagattggagttaagaacactgaaacactaacccgctaccacgagaagagacggagggggtacaggaagggaaggaaggggctaccaacacaggggtcagacggaactgaaagggaggctaacttggtaaggatggaggaaaggcaggtctactccagggctgatttctggatgccggttcctgggcacccttgccttgtacttgccaccccctccaacttcacccacccccattccaacctggtcattctgggtggtgaaagacacccacacca

SEQ ID NO: 546 - DNA, 435 bp, Homo sapiens; identical to SEQ ID NO: 168

SEQ ID NO: 547 - DNA, 353 bp, Homo sapiens
ttttaaattgccaggttttattaagataattggcaaaatttcaacatacaccttacctgaatgaacacttttaataaaatatgaaggatcactcatgactacaactgaactcaaaagtgagatgtagagcagatttgtaaattgataaatttatttggtaagaaattattcacttcattcgcttcactccatagagaattctttgcagagaaatgttatgaacaagagaacaaagcctgtctctcaccaaagagcacctagagtaagagtttacaatgatgtatctggattatctaattcatcaaagtttatttccttttcaaaaacaactgctgtgtcagtctggagttccc

SEQ ID NO: 548 - DNA, 372 bp, Homo sapiens
ttttttttaagataaggaatgtgtgtttagctttaatgtctattaaataggttggaaaaacaggccaagtgtagggacctgactcctgcaaagggcctaccgcagccctctgcactcaagcagcagccccatccagaccaggagtgtgttctgttctcctggcaggcagggctgataggtgtaggatggcgtctgtttcctttggagtgtgggctggtcagaggagaaacagcaacttcctgctccttctcactgtgtcgttggctcaccatagaccacgtcctgcattccctctgattctctcatggggagagccctggaccttctggtggtgtcccagctgggtgggttcaaggctgctaccccgcttgg

SEQ ID NO: 549 - DNA, 430 bp, Homo sapiens
ttttcaggattcttttgttttattgataacagaaactgtgcataattacagatttgatgaggaatctgcaaataataaagaatgtgtctattgccagcaaaatacaattattccatgccctctcaacatacaaatatagagttcttcacaccagatggctctggtgtaacaaagccattttagatgtttaattgtgcttctacaaaaccttcagagcatgaggtagtttcctttacctacgatattttccacatttccattattacacttttagtgagctaaaatccttttaacatagcctgcggatgatctttcacaaaagccaagcctcatttacaaagggtttatttctttctactcaatttttcttaaaaagaatttcaagaatcactacacagctaagatatctgagacttgcaatggctggagt

SEQ ID NO: 550 - DNA, 252 bp, Homo sapiens
ttttttttttttttaaaagcttcaagatgcttttatgtcaagggtgtggggttgccctgcttggcctgcagtgctttggggccccatgtggtggaggggtgggcaccatggtacccaccaccctgctgcctgggcagaagtgcaacatggcacacgatgcctgggggatcactccccccagggactcatggtcagtgtccactcacaaggcctgcttccctcatgacatctggccagtgacacccacagggg

SEQ ID NO: 551 - DNA, 401 bp, Homo sapiens
ttttttgtttgtacactttaagaattttattgtgggctgtaatttctttagacttcaatgtcaggacttcaacttgcaaggggagttgatcttgtgtttagtttttcctgggaatgagacgatgggggttgggtggtaaatttatggtcaagtttggggcatttgcacattggcttgtaactggagtaagttgtggtgttgtttaattttgtcgaggcttgactggaacatatggctggaaattatttgggactgaaagagaagcggtagtaaacatttgccttaggtaaaatgtagctttgggatgaaacttttttaaacagctttactgacatttaattttcacatacctcacccacttaaagtatacaattcagtggttccgagtatattcacaaaat

SEQ ID NO: 552 - DNA, 257 bp, Homo sapiens; identical to SEQ ID NO: 170

SEQ ID NO: 553 - DNA, 434 bp, Homo sapiens
tttgttaaagaatgctttattaatacaaatacacacaaactctgaagcactaagaaatttaaatatctatgtcacagcaaacaggtggcaattcaacatccagggtcgacagaatgcttgaaggagactgcaacagattggattcccatggtggagagggcatcttcacaggtgaaggggggcccagctgaaacagcttttcaagctctctctcctcgtcaaggatcatgagaggcactccactcaaggggaggtgcgcaatctggtgctcttcaggcaggtcaaaactctcaaagtctagaggattgaagggaaagaatttttctatttctggataggcatcatctgaggcaggaacagagctttttgctttaacagtcttctcagtcatctttttggcagaaaagcttggctgtttttgtttgaggggtccc

SEQ ID NO: 554 - DNA, 313 bp, Homo sapiens
aagcagttaaatttttttaacttttattttttaaacaatgggctaaaaataaacagtattaaaaggttaagtttatataatacatatgtacacaattagtggtgttttcttttcagacaaaatactgaaacaaatattagtttaaaaacaaactatacagaagacttcataccgtaacaataaatgtatagtttcttcaaagggagaagagattcacatatctgataacaaaataaactagcaatctagttttctaatctactttatgaggctggattttttttttagaaaagctaatttaaaatatttagaa

SEQ ID NO: 555 - DNA, 392 bp, Homo sapiens
ttattttttttttttttttttttttttttttttaaatatgaaattttactcgacaacagaaaaggagaaacaggaaaaaaggtgcctcgagcaaagtcaatgacttggtggtggcagagattgtttcctccaaaacgagaatggtagtaactagggcaaatttcacaggcctaccaccaatctcaccagtccaggaattatataggaatggtcacattcctaatgatggtgaagcagaaagccctccccacagagagacagcccactggggacccagctcaagctcttcaaaacgtggcagctacaggtcacaagactttggcagagatgtccgaaattcttcaaggaaggcgtcacgatcagagggacggatccagctcaaatagctttct

SEQ ID NO: 556 - DNA, 272 bp, Homo sapiens; identical to SEQ ID NO: 171

SEQ ID NO: 557 - DNA, 421 bp, Homo sapiens
tttttttactttgtaacaaaaatttattaggattaagtcaaattagaaaacttcatgctccaccacttgtcatatttacctgaaatgacaaagttatacttagcttgagtgtaaaacttgtgccccagagattctgtttggaaagcaaaaaaataattgatgcacatagcagtgtgcctgataccaccacagtgaatgttgtttaaggcctaacaaacagtggtcagcaaagcatacattacttttaagctttgggtccaaggaagatgtcattccctacctccttcaaaagcagactcatcatagcctgggcacctaggcctggagcctattttttcgagtctaatatgaacatctggatttcaagaggtgctaggcttgaggtatctttatggcttaaaaggcacaggtcatgcagctg

SEQ ID NO: 558 - DNA, 284 bp, Homo sapiens
ttttttaccttaagaaaaaccaatcgctttatttttcctcaatatatgtttagaaaactggtctgagaagaggtttcatgagatagaccagaggactatgtacaaaatcaagagttctaaaccaataagaaaaagggcacaatgaagcacacatccccaggggccacggcagcctaggaccttcctatcagtggggaggcaaggtctttgacggcttttgagttcagctgagggatcatgctgatcttcaggagtttgctgcttgcatacttattcttgatggc

SEQ ID NO: 559 - DNA, 405 bp, Homo sapiens
ttttttttttttttttttttgttttctcaactttattgtggacaggagaagggtaagtagacttgaaggttttttattttttaatgaagaaacaatttatcctgtgtttgataccagatgagactgtaagggtcacatactccttaagcctacacatcaattccaggtgaagtgcttcaggcttggctcattctgacacctaagaagggccctctaggccacggttgggaagactgtttttgccttagcgccgtgcaggtttgggcattatataaacttttacaggcttgctgaagggaatggtgccctcgatgctggtttccacctgtggtgacatctcaccaccctccatccaggggcattttggaatgcgagcactggagttgtaggccagcagcagcctca

SEQ ID NO: 560 - DNA, 389 bp, Homo sapiens
tttttttctttataactttaacaaatgttattaaaagcagcaattaaaaaccatgaatctttttgaaggtgcagagggttataaggtcagttggcagtaatgcagctattatctggtatgaatgaaatgctggggtggggagtcagggtgacctcattaggccttgtgctatcttcccaggtggtgcagacaccccctccctccttttccctctccaggcccacagcctccccagagcccaggtagggaaggtccagatgtactgtaacaggattgctcatcccaggctatctcagaagtctggaaagcaggcctagaaggttgctgggctctctgaagccaggcaggaagctacaaattggatcccagttcccacagcacccctgggc

SEQ ID NO: 561 - DNA, 375 bp, Homo sapiens
agtcagaatcagactttatttaacaatctgaaaatgggttcttccggctttaagtcttgcaaaatgggtcgtaagtcaaagacagatttgttcactatcctctgagtgtgtgtggttatttctctgtataggcaagtgtctgggtctatagatacttttgctttttatagtgattaaagctccactttagttaatgtataaagtcttattctaataatgctaaaaccagaattaaatattccctgagtctaatgttctctgctccccagcctgcctccctccatccctcccgtaaggctgctcctccgcctccattaatgccaggtctttagacagcaccagcattcctactgagaacccagggatggatgctgg

SEQ ID NO: 562 - DNA, 354 bp, Homo sapiens
tttagaaaacaatttttatttaaaaaatcataaaaagtactggaatgaaaatacaggtaaagcatttgaaaattatttttctggcttagactgtttactggctcgattctagctctgtcctggtaaaggcctccagaaccttcacctactattatcaagtctggcctcatacggagggacttttactgtactgaaaggaagccagctgaagccgagatctgaagcgctcagcttccagttcccggaagaaaacatcatcatcattctgtgttatcatgtcctgcagctgctgaatttccttctccatcttagatctcagctccctcttcaccttatgtaatgtctgggcctgag

SEQ ID NO: 563 - DNA, 340 bp, Homo sapiens
tttaccaataaagtgatttgtatataactggcggcctggcgaggggggcggttggagactgaattgcccattcaaatcattagactttttaaaaaaacatttcctcgatggaaatttccagttccacaaaagaaagtaatcaaacagatgttcctccttaactcttaaaccacgacattcagatgatctatgtgcaaattaataaggttatgacataattcaattatgtgacaaagccgagggagagttgacaaagaaccagactggcatcattgacttctcaatgaagtggagctcggtaaaaaatctagatgaatcacaggttgtctgaccagaagat

SEQ ID NO: 564 - DNA, 438 bp, Homo sapiens
tttttttttttttttttttttttagagaagctcaggtgtcatttttattctatggttttaaaatgaaataatcttggttagtcacttacaactttgacgactttaaccacctgatgaaacctaccagtttctgcagcctcaggtctccataagggtcttcttaaattggctcctcctcatttcaccaccagcttttggggcccaaggtcctaaggttgtgttcttgaagccaagttcccacattaatccatgttaaccacatgtggttaaacccctgtttaccatatacagatctatcaggcttggtgctacagagatgaggaagacagtccaggcctcccgggggcttagagcttgggggtgagagtgggggtggcagacgttaacaaaatctcccatgcagtgtgatcagcattggcactgcgctgctgtcaccaa

SEQ ID NO: 565 - DNA, 447 bp, Homo sapiens
ttttaacatattaccacatccaacttctttattcttgagaaaacaaaaaagtccaaaatcaaaggaaagcacccgttttaaaccctcatatctttctcagggctcactgcagtctggccatatctcaagcaggtctgtccaatggcttggaacatagacttttgcagtgaaactttaaaaacattacttgaattaggattacacaaaaaaaactaaattctaagtgagcacaactatcgctgagaccctgaaatttcaggaaataaacatggttcaaaactcaaactgttcatcaaaataattacgcaggtcagccaccactgcagaaccatcactgctcagaggaattgagtccgcaatgactgatctcatcatctcttcattagcacataagcggttcaacttgggatacgcaaggagtctctgcagaggtacgaaaaatttatc

SEQ ID NO: 566 - DNA, 367 bp, Homo sapiens; identical to SEQ ID NO: 174

SEQ ID NO: 567 - DNA, 394 bp, Homo sapiens
ttttttttttttttttttttgtttgctggataattttttaataaagtgaggtttacatcactgatatttaataatggctatatgcacaaaagaaaacacacctttttggttaaggggtgaggaagttagagaaagcatgagaaacagggagcatgtggggtgaggcggggcaggagtggaaggctgcaggacccccagctcactccctgcctgcggacacccatgacactacagatcaaggggttatgaatgacatggattcagatttctttcattctagacttcaacctagccttaaccttttgtttcagcaccagtctaacagagcagcgcaggcgtttctcatccagcagcaatgctacttcctcacccagggcaggtgcatgggctgacc

SEQ ID NO: 568 - DNA, 408 bp, Homo sapiens
aggtttgtccgtaaggcttttattataaagaagattccagagtcccagctgcccccctccagcccccatgggctctgagccagtcccaacactggctgagttggctgcgaggggcccgcatggcccatcggccgacagagggtcgtttctggcaggaacggagtgtgtggtagtctcaggcgccaggggtgcgtgccaggtctgcccgctctctggaacagtcatttccagtgttgcatggggagcctctcgggacccctccccgggtcctctgcgcaagcggcagctattcacagttggtgcatgatacgttttttaatatataaaagctttaaaaaaaaaagtggtgctatctttagaaacactttcagcaagatcaagtagcccagctacagcctcggtgcatct

SEQ ID NO: 569 - DNA, 318 bp, Homo sapiens
gtgaacaataaagctttttaatcacctgggtgcaggtgggctgagtccaaaaagagtcagcaaagggtggtgggattatcattagttcttgtaggtttgggataggcggtggagttaggagcaattttttgtgggcagggggtggatcttacaaagcacattctcaatggcggagagaatattacaaaataccttcttaagggtgcgggggtgcgggcgtggggtgggtggggagaatattacaaagcaccttctcaagggtggggaaggtgtattgtcacaaggtcaattgatcagttagggtggggcaggaacaaa

SEQ ID NO: 570 - DNA, 408 bp, Homo sapiens
ttttttttttttttttttttttttttttttttttttcatttttagaaaaaactttatttacaaaaccacaactcagtctgctttggtattgacaaaatccctacaactgagatattaaagagatacatttattttagagttacataaaaccagaatccaacactaccctactttcctattcctttgtggctctgaatgcagctttaaaaaaacaaaacaaagcaaagcaaagcaaaacaaaacagctctttataatgtacaatggcttaagcaaatcgctttagttttttttctatttaagatttaggacagactactcgtctaaaattcactatttacagagaaggtcctagggaacaggataacttatttaggtttagctctcataatacaatatccataatggct

SEQ ID NO: 571 - DNA, 295 bp, Homo sapiens
ttttttttttaaattaaaatgaccttttatttgcctggacaacaaaaattttccatgattttgcttttttgaaacaatgataagaaatttttttttaggcaataagatactaagttgtatcaacaaactgcatgggatatttccacaaggagaggattttgttccctgatctagtttacgtgacattttcccttatgcttgctttctctgagctgactcttcttaaactgacctagatggtaccctatttcaactgactcagagttcattcaaaaatatgatatggtgacatggc

SEQ ID NO: 572 - DNA, 559 bp, Homo sapiens
tttttttttcaaattttaaatttttattaaaaatcacagtttttaaaaatgtccagtgacacaatgtagctcttctgaaatgaatggaaaacacaacacactgctaaccagtggagggagctctctgcagggctgggagacctgacaatgcagctgtagcctctgcaagtgaaaatccaggccgacttgcagtcattggactgatgtccaagtgcaatcaccatacagcagctacaggcagggctggctgatagggagtatgggagaaggacacgctcagatgaaaacatgcatgcaacgattttcaccactgaacacactgttttctgtgatagaaactgtcggccctgctgggggacaagatattcacggcctcactagccagtgtgatgccaccagggcagcctgcccctgatgctcctttgttacctgctaaagaaggaccataaggtaaaaggcaccttaccttatggagtgagcccagacccagggaaaagcttgggtagaacaatcaaggggcagcctgggtatgagattcagccaagctagctgctctagg

SEQ ID NO: 573 - DNA, 538 bp, Homo sapiens
tttttttttttttttttttttttctccaaagtaagtttttattacaaaaacctttactacaattcaatgttttattaagactaaagtcaggaccttgccaacttactgagtcataaggaaacacatgaggaaagtcaacatggtctctaggctgacttgaattattccttgactaagaattctagggttatgtggacttttctgttaacatcctgacttagttcctttctttagcagcaaaaaaaacagcagaaataaaattcttggcaggctgctctacagaataaagtgaacaataggaaatatggatatgaagtgcagaagcagcaagttaccacaagatggggctatacactcaagaaagaacagttggttagcgaagtttctctattatcaaaaaaatttaaaaatactttgagtttatttgatgccttcatctttacagcccagctaagcaatcccataaaaatgaggcactgactaatgttttacaagcccctcagtctcctccagagagtggaggattattaggataggc

SEQ ID NO: 574 - DNA, 424 bp, Homo sapiens
  misc_feature (1)...(424): n=a,t,g or c
tcattaaaaaatttattttcatataaaagtgccaaaatatccaccaatgtcataatctatctcaataaccagtttacactagtaatcaaaacacaagcctctttattcacattgtttaaaaatccaattattttcacacattcccacagtaactcgagtctctagacagtgggaaatttgcattcctattcgctgtggtagtccatatgtccaggttcatataggcgcgaaacgggttgaaccccgggtagtattccttgcacacgaccgcttggttttccatgtgggtcgaatgttccgtggtggggttgatggggcagcaattttcatacacatcgctttgcgnggcccagatggaaccaaaaagtccagacattggagacaagcttcgggtgcttgtgaggtagggcggagagctgatgaa

SEQ ID NO: 575 - DNA, 516 bp, Homo sapiens
ttttaatggtgcacaagctcattttaacaatataaacaatagaatgacagtgagatgcgtttcagcaaggccagtatcacagaagccattctgtattttggtttttgtagcagctgtgtaggtaggctaccagctccttacttccagtaagtggatgtctccattaatttccagcgtgtcaatactgctgagctctttaaatctgtgtttgtactccaggctgtgtacgccatttactgcaaccttgaattctctaacatcacagtaaattatcatctcaaagtacatcccaggactaaatgggaaagaggtaatatttctctcttcttctccccaggactcctgaagaaaagaatttcttacaaatgctttaatattcaggcgtgggttcaagtgtagagcaatatcctttgattttcctgctagtaggtcaacattaaagcttttggcatttgcattcactgctcctttaacgaggacagttcgtccaggggccatgggggtgtttcaccttgc

SEQ ID NO: 576 - DNA, 498 bp, Homo sapiens
tttttttttaaatgaatttaatctctctctagaaacagtgcactgattttacaaatgtccacatttggttttcagtttaccaagatgatgccagtatagctagtgagatgcagcaccccatcctcagccccctcgcctctggaagagacaccagactgcaaagggcaccgcgtacagaagctaacggaacttgaatgacaagacaaaaagagcagaatcagttagtgtgacacaacattctaacatgcctgattcttacatcaaatatgctaactttggggttggtagggggagacaaacaaggagaatccacttgggaacaatttgatgaagtttgcaaatcagcactttacccccaaattaacaacagcttgtatggaaaaaaaaatgctcttttaaaagtatatggtttggacaggtatatttgttttctcttgtagtttttgtaaaaaagtatcaaaaccttgggcttaaatatatatatatatatatatatat

SEQ ID NO: 577 - DNA, 355 bp, Homo sapiens
tttcttgtaaattttttctttatttaaacttcaataaaaatatagatttgtaactcaatagaaagacagcagtgataataactcacacatgagcagctcgcaaatttcaaagtctttggtcttcaagtcctatgtcacagcttcctcagtctgattccctccttctctgtagaattctgagaactagtttggttcacttaatcatctcaatggagatgggcctttcctgccattcactcaaatctagaactcccaatatgtggctcacaaatacttcagtcatctacaaaagcatctggaaattagataattttagccagagtcagggacataaaacttctttaaagggatgcag

SEQ ID NO: 578 - DNA, 410 bp, Homo sapiens
  misc_feature (1)...(410): n=a,t,g or c
gagtttttgttatgtttattgccacygggagaatttgatttaagacatcagaaaattgcattatatttyccgbgtaacatggatactttaaacaatatttygttcattcatttgcttgttcattcaactaaacgtattgaatagctcctccatgcaagcacctctctggccctgggggtgcagcggggtatgaagcagagaccctctgtccatggrgccacattctgccgggacccacagtccgtgagcgtggaggcaggagcactgggaacagctagctggctggggccttctcaatagggaatgtcttaggcagtatttganggatacctatgggtatagagaacatactgggaaaaggaaagacagtatttttyttagaacttgaagaatttctgtaawttkttttt

SEQ ID NO: 579 - DNA, 323 bp, Homo sapiens
gtagagagcagagatgataattttattgaattttgcccccaagactcacaatgcaatacagattcatattcagtaaacacttattgggaatctacactatcaggaatgctttttaaccacaagtaatggaatacacaaataatagtggcttaaagacattagttatatcacatgacaaaaaggctagagatcattgtttttgtgttaacttgttgcattgctatcatataactgctttcacttcaagcactgtgcagagcctcccagaggacctccgtgtgtgctcctttggttcttcctaggttccatagccagccttagct

SEQ ID NO: 580 - DNA, 335 bp, Homo sapiens
ttttttttttgcccaaatgaccaatttattagaggctttgcagagatcaggacactctcaaagcttttctgatatgtcctgaggactctgggcctgagtctactttttaaagccattctggaagagaaaaaaattcagatgcttcataatactaaactttttggaggctcgtgtattctgtggagccccatttgggttcccagggtgcctcctggccctggggactctctgtcttagggaagggtggccccagtacagcagtgaccttgcagctgaagatccctctgtgaagcagtgtgatctccgatggctgtcctcccctgcacgagggatca

SEQ ID NO: 581 - DNA, 450 bp, Homo sapiens
  misc_feature (1)...(450): n=a,t,g or c
gagaagtagtttttttatgtccattattgtagagaaattgagtaccttgcccaaggtcacacaggtcacatagtaataagaaccgagattcaaagctctaaaatcagtagtcttcaccatggcaccacactgcttcaaactgaagggtaggttgagctgtgactagaaagacacaagcatggctacatatctggagttgtcaactctggattttttagttggaattgggtcacctataattatctgtattcatctataattctgaaactaaattagatgggctgttttgattcttacacttttagacagtgggtaggattattataaattattcaggtatacaagatcttgtataatcaaattactctttttgttaacccaaaattttttaagntggcnttcttaatgagngcagcagnccaanttgggtggggaacntaaagnacctta

SEQ ID NO: 582 - DNA, 341 bp, Homo sapiens
  misc_feature (1)...(341): n=a,t,g or c
ngcatttattgctagaaaggagaagaaaaacaactttgttccctggnagctaatatcttgccagatattttggcaaggtactttaacattattcttaaatagaaatgcccaaacatatttttcattgatttcacatgaaaaatacggcaacactttcaaatctgcacacgtgcatgaaaacttcttataatgatgttgttctatttcacttggntccctgtttatcaacacttgtaattctcctgttaggatattctctctatatatcttctccctcattttatgtttttatcctttgggnttccaaaggggctttatcntggtttcncccttccaaaacc

SEQ ID NO: 583 - DNA, 459 bp, Homo sapiens
  misc_feature (1)...(459): n=a,t,g or c
tgnnttcattntcaacattaaatgactatttatttttcaggtttaaaagatttcaaaatacatatgtacaagataaataaactacacaaaaattatgtcatcaaatatatttaaaaaaaaattcaaggtaggcaacttagatcaccttggcaaagaacacattaactangatgaaccaggacaagtcccctaaacatcaggatgaaatttcttttctatgcctactagctgactggccttccttttctgngttgagttgtgtactctggagtcaccagcctctggtagattatcaagcatctcttcctcatcagccttttgtttctgtcttgcatgcttctctgtccactgtctgggcattcttgaggaaggctggcttattatatttaaattctgagggtatgtcagcctgagcggggtcatcagggttgggttccgacatgagcagccgattagggg

SEQ ID NO: 584 - DNA, 402 bp, Homo sapiens
  misc_feature (1)...(402): n=a,t,g or c
acactggggagctttaatggcctgttacagggtggcagaaacagtggctgggtctgggagtcacagcaaaatcaggcgcccagaaccatggtggaaggtggggttgctagttcatgaaaacttgaaggacattaggaagaggcggcatttgatgctgtcaagtaactacacacagaacaagggcatgataaaagtcctaatgcacatagagaacaaagccctgctcagaaatgctgtcctcaccagcagaaaggactctgtggagaaagctgtcccttacataaaaaaagaagaacatactgggttagcacttgatatccaagaagtgaaaatggtcgtttttcgaagntttaacagttttgctttcaccaaattcccttttgaggttaggttaagagggca

SEQ ID NO: 585 - DNA, 409 bp, Homo sapiens
  misc_feature (1)...(409): n=a,t,g or c
gccagcttaaaaaagtttaattgctgaaaacatccaaggcaggtgcgggccagtccctgcggggctcacaccccccttattggaccatcagctctgtgatgcccccttctcctggctacaaacctgggaagtagggcagctggtcccagggccctgagactnggtgctgctctagaaggcctggtggggggccagccccaanggcccttgaccagaactggaacagcaggcaagatggggcagcgtggggtgaccaaagatcctggatgaggccaatccaggctgggaccagcccaggtcagcagtnagaccaggggagacagggtncccagggccttgcccaggggacattgcttgctganccccctgccacccttgcacccccttggggcnacatgctaaacggggc

SEQ ID NO: 586 - DNA, 451 bp, Homo sapiens
  misc_feature (1)...(451): n=a,t,g or c
ttaaattcaaaaatgcctagggtttattggaatagtcagggtttatcagaaatcatccaatataagcatcggacatggggaaaacgacaaaaccaaaactggaactaattaacaccttgaaaatagaaatacattcctgtgggaggagaattctatgcctttgtcactagattagaactggggcaaagaatctgaacaacttgtgtaaggcctaaggtgtcttgtgagatccaaatccttattaaaatataggcagcattctagctgctaatttaggtaacaaagaaaatcaggttaaaagtagcagagaacattattccattttttttttctccgtaacctagagcaggggttagaaaactttttctgtaaagggccacacaggacatattttaggctttgcagaccagccagtctctgttgcaactattcacctctgtcatccnaatgt

SEQ ID NO: 587 - DNA, 460 bp, Homo sapiens
  misc_feature (1)...(460): n=a,t,g or c
tttttttttttttttttttttttttttttttttttggtctccatatacatttattttgtgtagacaacaatgacttttcaccatttcctttcctgnggttccatggttctcaaaatggtaatttcatttatacatagcaaaaagttcacaaaacctttcagcactgttcacattttcacatttgtttaggaaacaatttgtttaggaatacagctagctgattttcttctgatttcttccacttttggaatcccacataataataangttaaagtataccaagaagaacaggaagttcaagcaagatacaaaacacaccaatacagnaaacaagtccggtagtttctgaggaggatccagtgtgacagtcatncaacgtcagaagcaccatagggatgactggggataggaaaccaattattgntataattcngggaaagaaaggtaaaacntggaagat

SEQ ID NO: 588 - DNA, 216 bp, Homo sapiens
gtttaaataagtttttacttctccctcaataagatatttgaaactgtttttatatttcatattaaaaataaacctaagagtccagagaaacttgccaccagttctggagccatgagcaattctctcctccctctggcctcagtttccttgtctcgtgagatggggagaatctttgatcttgatctttagtgggtcccccctccatggcccccaggt

SEQ ID NO: 589 - DNA, 465 bp, Homo sapiens
ttttctgtacaatacacatttattgagcactagatatatgccatgctagatgcaggtgacccagagcatcaaggagcaatagtctggtggcagagacacacacaatgtcactgtgatgtattaaagcagtcagcaagagatgcagctcagggcactgtggggatatccagaggcacagtaccttctgcctgtcagtcagggagggagaggagcacaggctgaaggagactggaagacagcagttggcctctgatagtgggactggagagagatttctaagggccacttcttgttttcagggactaggttgggctagatatggggctcaggatggacaaggcttagagccaggttggagaagatgaaagagcattactagaggaatggggaagcctaggctatgccctttactctgccattgactgcgtgatcttgggcaggccatgtaacctctcagggctgtgc

SEQ ID NO: 590 - DNA, 252 bp, Homo sapiens
  misc_feature (1)...(252): n=a,t,g or c
tttttttaaaacattaaataattttattcttttctcatttacagtagcccagtggtaagcatgttagaaaacctgaagaaatttaaaagtttttggtttacaaaaagcatgtataaaaatacctgttcagacaaacaaagatctcgatcattacattgcccagctttaagaatcccaaaaataactaaaatactgtcaatcaaatgagagggctacatgggnttattaaagtttattttaacaattttagcg

SEQ ID NO: 591 - DNA, 440 bp, Homo sapiens
tttttttttttactttcatgcaaaatctttatttggaaacatgtatgttactgagcaggccagccgccatcctgaaatagcaaggatatttacactgtgcagagaaatacaagagcttcttgaagacattcatctgtgctttgccggcattttatctgctactttgtcctgcttctctcttccctgtgctcattattcttcatgcaccctcacctctcatcaccttaaggcatcctgtaccagcctgatctgggggcgatgactgcagccggcaatcggcaattaccaatggtgtctttctgggaccctttctacctgtcttaggtattaatggtgcccaaagaaaaaatgaagagatgaaagtttctgtggttagctgggcatgggtggtgtgcacctgtagtcccagctactaaggaggttgaggtggggatagtgct

SEQ ID NO: 592 - DNA, 330 bp, Homo sapiens
  misc_feature (1)...(330): n=a,t,g or c
ttttaaagaatacggcacttttaataggcggcagccccaggnggtgcgtggacagaccctgtccacagcgcctggctcccgtgctgcctgtccttccatctggaatgccaaacagaagctcctctcaggtggcatctggggagtaggtcccagtcctgaaatatacaaagtggcgcctcccactgggcagtggtcactgggctgcacggtcctttcaagtcctagggtggcccctcaggtcactgcttggccttcttcacaatgggtgcccacagcagagatgacggtggtcttnggagccgctgggcttgggtgggtgaccgtgacaac

SEQ ID NO: 593 - DNA, 362 bp, Homo sapiens
  misc_feature (1)...(362): n=a,t,g or c
tttttttttttttttttttttttaacggtagaaccaangtttattaatgacagcctttattacaatcactctcaagtgtaaaaaataaagggtgattaattaatatttaaaactcactcggacttgctgtttggcctttcagtggatgtgccaaagggaagggatcttgcctgattctgaatcaattggccagatggagttcactggagaatgaggcaatcaacaaaaaagacaaatgatgccaactggagagagctcgtgtcttctccatgttggaaggacattacaaaatggcaactntgggtgggggcagagatgaagtaagacaaccttacagtcggagtaagatgtgaatacccttt

SEQ ID NO: 594 - DNA, 418 bp, Homo sapiens
  misc_feature (1)...(418): n=a,t,g or c
attatttttcctntttatttctttaaataaagtctcttataaatttatttccccaacaattttgtcattaggatagcattggctttcacctagataacaagatttttcagcacaaatataaagttttctgtaagtagcatccagtagttagtcctacgctgaatccaaaacctcttattttgcatgtcattctttcccagtcttcagttgcacagcgggaagagggaaaaggggtgggaaggaggcagagggaaggagaggggtgctattttatcaggggacaatgaggaattcaacatgggctggggggagggcctcagggaaacttacaatcatggggcaggaaggccgaaggggggnaggaaagggcacccttctttcaccaagggcttccagggngggggggnatccatcttta

SEQ ID NO: 595 - DNA, 220 bp, Homo sapiens
  misc_feature (1)...(220): n=a,t,g or c
atacaatangntttattgaggatgtgtcaatacagttaacatggttgcttgtcttttcaaaaagaagttccattttctttgattcccaagtgcatttttcctgaatcttctgtgatacagggcacatgataggtatgtagagagctaagcttcctataccaagttagaagtgaaatgactagtgggaaaacatttaaactttaatcttaaaaaaaaaata

SEQ ID NO: 596 - DNA, 560 bp, Homo sapiens
  misc_feature (1)...(560): n=a,t,g or c
tttttttttttgactttctcagatttattgtatgtcctcagacangtagataaaaatgcatggggtttacttccagggatttacagaccaatataagtaaacagctggggtttctttttaggctgtttctcttggaggtggtgcaggaggttgaggaaagcacctctgatgagcagatagctggaggctgttcccacagtcatgtctcagcgaagaagtcggagttcagcagccatcagaaccaaggtatgtgtggtgatcttcggaatgccactccaaatcctttgcactttcttttncacacagcaggagttntaaaagantgcttccttttattattaacactgagaatccatgcagagagtttacactaaacacatgantacattgtgtttttaggaaggctgggtnccctcagtccccagatctttgaattctaccattaagttcaggtaggtttttngagacagagntttgcccgcatcatatctgtgacactgactcttctgggtntagggttttctttggccaggggtttcttgagttcagnccctgatcat

SEQ ID NO: 597 - DNA, 414 bp, Homo sapiens
  misc_feature (1)...(414): n=a,t,g or c
ttttttttttttaattgataaaaattcattttttatttgaaaagtgtgcagaaacaatcactgaatacaattctcaaccatagtattcatatgccagacaccaaaaaatcattggatgctatgatttctgaagccactagaactttggtacaacaaaataatgacctaacagtgtgcgtcaggaaccacagtctattaaggggcatatagaataaaaacttcaagtttatagttttaagttacattcatagcactagacaaaacagatctatataggagacagacaaantaatcaaacgtgcttagcctaaaattanagttaatattacttgaagggtaaactgttgggggntaccantgaaggcacttcaggtgtttattatttgggaccatncgtccttaccttttttnacc

SEQ ID NO: 598 - DNA, 266 bp, Homo sapiens
  misc_feature (1)...(266): n=a,t,g or c
caatcctcaattacctgcgggatgggtctgtgccactgccggagagtacgagagaactnggggagctgctgggcgaagacgctactacctgggtgcagggcctgattgaggactgccagctggcgctgcagtccagggcatactccggtttctccagttgttccagaaatgtgtttttacagctggttcatcaaaccagggtccagtctagatcttcacgttgcatctggttatctgcaagttaacaatggaaagcatgacttttt

SEQ ID NO: 599 - DNA, 381 bp, Homo sapiens
  misc_feature (1)...(381): n=a,t,g or c
gatttgaattttngtactttattattagttatacagtaaatgtgataaacaagtttaccctgtgtgatacaaaaaataaaaaactgcagcatgaccataattttttctttatagataaggggctctcatgcttaaagtctgattaacatagccacatctgatttcaaaatatagatatgcccaatgaggtagttcttcacaatggggaatcgctggttaggtgttggttacccaatttcttttatttaaagtttaatgggatatttgatgccatataggacaaaacatttgggaagggagtttcaaattcccatctgggaggatagggggtcctattaaaacagccctaaaaaaaaatagggntggggtttaaagggcntt

SEQ ID NO: 600 - DNA, 463 bp, Homo sapiens
  misc_feature (1)...(463): n=a,t,g or c
caatgttntttattttaaaatgatgaggtttaattaatttaattaacagaaatgtattgagtacctaggctcctgtctttaccgtagccaaggcagtagttggttcaagattacttctcaaccattagcatgtttccagggagcgctgcttctacagagacagatttaatttttacatgtgatggggaatgaaatatcctgtacctccctcctggcttgatttagcgataagctgctttataaccaaatctttccaaatgcctactgtaaagtcaggctttcctgactactgcattaggattcactacctgcctgtgttgccctgaaatgtctctgaccaccaggcagggtgtcagcagccggctaggagggggcagcagtgaggtgacttctggaacctgggagtgagctttcccgctctatttaatgggccaggggtcatgcatttattctctggctgata

SEQ ID NO: 601 - DNA, 266 bp, Homo sapiens
  misc_feature (1)...(266): n=a,t,g or c
cagcacaaaagcgnagttactatttacagctccggctggcacctgcccacctggccagccgcctgcagggaggggtgggagaggggtcagccacatcagcagggaaaggatacgaagcaggtaaagacagaaggaaaatgggcgggtgcggagaaaccaagagggaggtggagctccagcaatgcggacacgaggagacaggagcagaaggggctgggggagacctgacctgtccttcctctctccccccagattcccatccaggg

SEQ ID NO: 602 - DNA, 333 bp, Homo sapiens
  misc_feature (1)...(333): n=a,t,g or c
taatntnactacagtcactgtttaatcatcttttgaaaaactgttaagaactagagatgtaatgaaaataagacttagtttccactctcaaggagactgaagttttagggagcaggggaacatagaaaatagatcatcataaaactaggtgatggaagtatgttgcagagtattcctggnaaaacagacaatacagcaaaatcttggaagataagcaacattaggtcagnttaaaggtagagtggtggatgccctgttcacaacacagcctgtgagnaaagcatggcaggagaagagtntgagccagggcttattcgaccanaggggtggcct

SEQ ID NO: 603 - DNA, 412 bp, Homo sapiens
  misc_feature (1)...(412): n=a,t,g or c
gtggaatataggaaggactgcagtagatgctgtcactgctagggaatatccccaccaagttccatcattctcaaatgattttcaaaattttttcgccatgtccatgccctacctgcaatatcacatgcctaacatttttaaacagattcattagtttnaattacatttatttaaaaatgttttaattacagtcataaatgaaactcagggagaccanttacacataggtaaccataaaacgaantacaacaggantcaatataacgtaactggaaggactaaccagatatatttnctgcggaaggctgantttgaggtcnggttatttccttttttaagggggggngggccggtntttgggtggggnattttcctggttaccacngggggcttggcccccttggtggggttc

SEQ ID NO: 604 - DNA, 396 bp, Homo sapiens
aaaggtcacatgaatgtttattacaacatagaaaagagggaaaggaagaaaaaggtttccaaagccgtatttccaaggatttaaaaaaacacaaacttggaatgccaaagagatgtcatgctttatatatttataataggaaggtgtgtgtatgtataaatatgtacatggaaatatgtacacaggttttgactgtcatatatagtatttttcattgcatgtacagtaatgctgcttgagtgaagggttttaaagctggcagaaggctggagaatctggaaccctgcttggcccctagagggcgctgtggagaccacctaagcagctcccagggaagggtctgccggggctggggctgggtcctgagggtgttggggaaggctgagctgcaggcgg

SEQ ID NO: 605 - DNA, 312 bp, Homo sapiens
tttattgtaaagaaggtgcagtcggaacatgggacactgaaaatacacaatctctggtctttcaggagagggagagagtgatatatacaaaaattgtaaacatgttcacttaaatatccacacagaattggtctaggctacaatgtaacaaggttgtcactcaactgcatctcccgagggaggtgtctgtctgatgaaatgtggcaaccccggttggggttgacttaatgtgaaaagcccgctttgagcaatgcatgagtagtcagctttgcagggggctccaacctggggcctggcccgggagcagggtgc

SEQ ID NO: 606 - DNA, 505 bp, Homo sapiens
  misc_feature (1)...(505): n=a,t,g or c
gtctcaaaaacaggtattatctttattaaaaaatggatagatatagcagcacttacaaaacaggttcatcaaaggcattgtacactgtcaactgataatgtggagagggcagccccctgcccagctggctatgggctctgcacaacgcttgcccgcaaccacctgctccacttggtacaacggagcccagaacacctgcgaggagagccacgccaccgtcgcnctccacagcttcaagcttttgttgttgtggggagtcccttagggtcaagtagcaccttccatagcagcatcgggagcacgcactgggtgtctgggaggtggctgggtgtactttgacccactttattttaaaaaaaacctattaggcatttcaattaaaaaacactttttgccctgttttggatggccattccacaggaaatactttctgtttgtngggaaggaaacactttttccctttcaggatatcttgttaaaaggcaaacggacggcttccgttcgt

SEQ ID NO: 607 - DNA, 533 bp, Homo sapiens
  misc_feature (1)...(533): n=a,t,g or c
cactttttttttcagtttaatccttggatttcgtttggcttatatgttaaaaatcctcaaaagaaaggaaactaagccagaaaccttttaaggaggactccctttcaggacctcctacctattttgtttacattattaataacaagcaatagttcatatcaaagaattgtggatagcacaaatccaaaattgatttccttttccaccaaagaccacattttgctctatatgtgaggcatcatctgttgtttcagggaggctgggtacatcttatatctaggtatacccttatggtattttatggtatttncctaaataaaatttaatgacttgggcaggcattttctaggtcagggaatttcccatccatatggtccttcaggnggggcctataaggggtcccaaattttaaatgtggcctttgtcngtgggggggnaaaattccaggggtatggggcccnaaatacccccntaatcccttttaattcnccccaggggatttccggggccttnggggcccagncggggggccn

SEQ ID NO: 608 - DNA, 388 bp, Homo sapiens
  misc_feature (1)...(388): n=a,t,g or c
acatgacaacatgtactttattacatggatcagaaataccacatgtactaatagttgctgtacaatgatacacaacacccaactaagactatttaaaggttttgctgatattgaaaactataaagacacaatgtgagagtaagaaagtgtttcataagatagcataatgccaagacaattcatcgctttaggntattaaatacattccgcatattaaaaacttaatgtattataaagctatgcccattctttaaatgaaaacttgaaggnctttactccnattcatttttctttacagggnctattgcagtaccattcattgtttaaagcnggatgtttataaccatttttccatactttaaagtggggacttaatggggacggaata

SEQ ID NO: 609 - DNA, 361 bp, Homo sapiens
  misc_feature (1)...(361): n=a,t,g or c
acctttaaaatttattacataagctatacacacaaaatgaaatcctagttataaaagatgcatctagaagaataatttataataaaccaacaaaaatgagaatgtgtatctccaggnntataaatatatttaaatgttctcagtgactggcattgctttatgcattacataagatagtatgtactaattaaggtnttgaattcactgggttttagaaggctttaaaaaaaatccngataantcaacaacaaaantacagctcaactttgaactgcattaaantcccgantctctcattttgggtgaccnattccttattcccctcaaaaggtttcccaacaggangctttttcacaaactg

SEQ ID NO: 610 - DNA, 242 bp, Homo sapiens
  misc_feature (1)...(242): n=a,t,g or c
tatggttattcaatatattcatttatttgacaattatttattcatttgacaattattcaatgtttactgcataagcaaaaaactgaataagacggttttctgcttttataaaacttacagttaagtagaagggacactgcataagaagtaacatgggagaaggctcaagtgttgacaactgtgatgaagagagatggaggnccngaaggaaattcaactgtggccgagaggcaactaaaagg

SEQ ID NO: 611 - DNA, 326 bp, Homo sapiens
atatttctcgtggtttataagtttctgaatttccaaatttgccactggtattttaacctacctacaatgttgactctacgtaaaattgatttttacatgtcaggaataagatgaggatcaacgaacaaatgcacagtctgtcttttctatagttcaatagtccatctttgaatagcacataatggaatgtcagaagtggttttttaataatgtatgtttacacttcattgatttataacaatcatggctatggttcttgggtagaggagaatgttttatactggaatgacatacatatgtaggtaaaatatgatagatctatatat

SEQ ID NO: 612 - DNA, 248 bp, Homo sapiens
  misc_feature (1)...(248): n=a,t,g or c
aaacgttaaacatcgtttttattcccagcacctaccattgtgccccccttataatagacagtaatggtatagtgaatgaatgaacaaatgaatgagttgagaaatccagaataatacatcacaagctacagcgaatttntcttgctagtgctcaggacaggtgaaatgaatcataacaggttggtgtctgtgaaaagctgacagagatgtgagaggtcccaccctgaggccaacaaagactctgcagc

SEQ ID NO: 613 - DNA, 180 bp, Homo sapiens
  misc_feature (1)...(180): n=a,t,g or c
atgatgtttaatgacacagatcttcccaaagtaatccaaaccccaaaacatcacaaaattattcatactattatacactccaaaagcaaaatacttcaactgcaatccttgccccagcatgnttcctcaaaattgngatanctccntgngaaacaaangtaaaaataataataatttaag

SEQ ID NO: 614 - DNA, 265 bp, Homo sapiens
acactcaaaacctttattcattgatttacaaactgtacaatatttacaaagtttaggcattaatcccatattgacatgaatgctgtggagagtctaaaaataaatatgtggcacatagcttaatatacacatcatggctctttacacttaagccattaccaatagtgagatgtaatggagaatttaatgtggtagaaaagtcagagtggctgaccagtcccggaccttccatgtgaatgactcttccttggctccttgaggctgg

SEQ ID NO: 615 - DNA, 431 bp, Homo sapiens
ggtctggaaggcgcagaaatggagcaagagccacaaaatggagaacctgctgaaattaagatcatcagagaagcatataagaaggcctttttatttgttaacaaaggtctgaatacagatgaattaggtcagaaggaagaagcaaagaactactataagcaaggaataggacacctgctcagagggatcagcatttcatcaaaagagtctgaacacacaggtcctgggtgggaatctgctagacagatgcaacagaaaatgaaagaaactctacagaatgtacgcaccaggctggaaattctagagaagggtcttgccacttctctgcagaatgatcttccaggaggtgcccaagttatatccagaatttcccaccttaaagacattgtgttgaaaaattaccagagcctcagtcttttaggttcagctcc

SEQ ID NO: 616 - DNA, 166 bp, Homo sapiens
ttttttttaaacagctctcagggactttaataattacagtctgtaacaaataagcagtgaatgtttgaatttggttggtggaaagctgggatgcaagtcatctctgcctattacgacaaaagcctatcgaccccagcagccagcacaggcaggctgcagctgaagc

SEQ ID NO: 617 - DNA, 468 bp, Homo sapiens
  misc_feature (1)...(468): n=a,t,g or c
ttccatttgaaagcaaacatttattgggctcctgttacacattaggactggagatacagtattaaaacaagtacctgttcatgaaacttacattctaatgggaaaagatcattgattaatatacaacaggtagtgataagtgctatgaaaataatgcacttataaaaagaataaagaatgacagcagatggggtatgaatgtgggggcatatggcctattttagaaagcatagtcagggaatgtgtctctcatcagatgatatttgaggagagacctgcaggaagtgagccagccagccatgaggttgtgctattggacaagagttgcaggaagaaggcagtgggtgtgctggtgctggctttgcattttgttcctgatggcatgcatctcttccccaaactcctggtattccagtgaaaggccaatttagtgggccccaaaaatagccctnggatgaggngtttttt

SEQ ID NO: 618 - DNA, 455 bp, Homo sapiens
ttttttttttcccatacaagatggtttattttatcctacacacagaaaattgcttatgagtatcacattaccgctcttggttatcagttaacaaaggctgctaatgaacagcatcgttatcaagttgggtaagagacgccctgggagtccaggcaaatcatgacaacacagcactttgttctgaaatatagctcatctttcatcacacacaaggagggtagcccagtccgagagatttcctggaaagtggaaaggcaaagaatattccgtgatgtgatcccagaaatacagggttaatattacaagggagagaaatgctcacggggccttagcctggatggcaattgtagaatgtcatggctttccctcagcctccaccagtccatgtcttcctatgcaacagccattgtacattggtaaataataaccacaaaataatttgtataagggggaaa

SEQ ID NO: 619 - DNA, 411 bp, Homo sapiens
acagaggttcagctattattgaaacttgtaatttctaaacttaaattggggcaagtggctagagtgcagagtaatgccatcactgcccactgggaatgcagaccgaataattaatagccacccctcagacggaggaccaggtgcagggtcgactctttctggatgttgtaatcagagagagtgcggccatcttctagctgcttgccggcaaagatcagcctctgctggtcaggggggatgccctctttatcctggatcttggccttcacattctcgatggtgtcactgggctccacctccaaggtgatggtcttgccggtcagggtcttcacgaagatctgcatgccacctctcaggcgaaggaccaggtgcagggttgactccttctggatgttgtaatcagagagggtg

SEQ ID NO: 620 - DNA, 480 bp, Homo sapiens
  misc_feature (1)...(480): n=a,t,g or c
caccagtaactgtgtcttttattttattttattttatttttatttttttattatttttttaaatctcttggccccttcaggcctacatagggttaaagctccccactgttgcaaacctcaggatgtctcacaatctcttgttgttttatgtagtcctgaacatatctttttaaagagtcgcttcattaaactcttctaaattacctgattctttcctgctggaacccagactgacacataaggtcatgcttttcaacatacagccgtgcaaaacattgaaggaaaggtagcacctggaatactttctataagcagaaagcagcagttgagccagaagnttgaagactctctcccaaagcactccacttcaaactcttttgtcatttggagcttgggtaactcacatnggagggcaaagtgagggactctaatcttctcagtatttggcatnccaactgacctttcattcangtaaatgtt

SEQ ID NO: 621 - DNA, 279 bp, Homo sapiens
  misc_feature (1)...(279): n=a,t,g or c
gaggtcataaagaactttaataattcagagaagaagttcaaagtgtatttaaaagttgagaccctgctttacaatattttataattttaaaaaaaggcgtttaaaggtgataggtgacttaataattttccactttcaaaatgggtttctagacactgttgttcatgaaccaaaaacaaacaaacaaacaaacaacaacaaaacccaaacactttggcaagcaaagtattattagtacatagcagcttcataacagtttacttttttaatataaagngg

SEQ ID NO: 622 - DNA, 317 bp, Homo sapiens
  misc_feature (1)...(317): n=a,t,g or c
ctggtttccttctcggtttattctgttagaatgaaatggttcccataaataaggggcatgagcnttcctcacgaccatggtccatgacaaggggcagggcagagggggcctggatgggagtccttgtgggggaccaggcaggggacttggatcaacaagcaccagacgagtggcgggggcaggcgagaggctcagtgggacctccaccctcgttgccccagctggtggctgaccaggtggctgtggagggtcaggagctgccccggatcctctccatgtagttgcnaantcctcagggtccttnagccccatgtcct

SEQ ID NO: 623 - DNA, 514 bp, Homo sapiens
  misc_feature (1)...(514): n=a,t,g or c
agagagggggtttcccatgttggccaggctggtctcgaactcctggcctcaagtgatctgctcatctcagcctctganagtgctgggattacaggtgtgagccaccacacctgcctttttcttttctttttgcnagttaaaaatatttattgctattccaggcttcaaatgagcccagaactcaggtctggtgtgtggttcagaagttgtcatggcataacagggtggcggacaaatccaggcagcctgaccttgagtccaccttatcttccttggacccctgctccacaaaagcagctgttggtggggccaactcttccacatctgcctcattcacccttacagagctccaagactggggcaggtggcctgctgatccccatagctcacagatgagangctgcccatacntctcctagcactgggaagggcctctccntaagattcagacacgatggatttggccttgttgagggagaagtgntgcanaggagtttgttttaanaggacaagg

SEQ ID NO: 624 - DNA, 444 bp, Homo sapiens
  misc_feature (1)...(444): n=a,t,g or c
tgaacaataatatctttaatataactgtttttgtgtgcatagaaatcatataagtaaataaaaaaaaacaacaacatgagattacataggtggttataatacaaaagtgagaaaaaagctagtgtctgagtattgcatcctggatataattccctgatatatggtaaagcataaaagagacctatttcttcaggagagtagctgacccacctcagggccatgactgctcttctctttccccacagccttagtactttttgccaaaaggcccagatttgagtaaaggggaacgccgtgagcgtaaggatccgggcataagggctgcagtctgttgagctttggcaggttggtgttcggggaagtaaatttcngaaggaatgggttcctnccctgntgggttgttggtttggttgctgattttccnggttgggtaccaaggcgcta

SEQ ID NO: 625 - DNA, 472 bp, Homo sapiens
  misc_feature (1)...(472): n=a,t,g or c
ttgtctttgcggaagggatttattgttccggagctgcagctgctcacagttatgacaggggtacactgcaggggcttgccaatttccgtggcgcctgctggagtccgcgtgtgtccgaagcacaaaaggggaaggcaagcaagaggcagtttgcttcgtgtcctcgatctccgtggagagccccttcccgcctgtaccgcctggcgtttgctgtcctaggtgtttgcttttgttcttatgtatagaaatcccagcctgtgnaagaggtctaatgttaacagaagcgttaaaatctatacacgaggtgggtgnggaggcaggggcaggcaccgaagcagacagacgactccatggcagaaggcatgcatcagacccgccgncccccacggccgccgnacccngggctgtgccccctgggaagggcttggggacattgggcggnaagggaacacagnagctggagcttggggtg

SEQ ID NO: 626 - DNA, 156 bp, Homo sapiens
ttttatgatgtaacagacatttattctcttttccttttacaaatcctcaggtaggtggcattatgtccaatttaaatgaggctaccagggctcagattaagaaatttgctgtcacatagctattagatggcggcacctggattcaaactgttcctc

SEQ ID NO: 627 - DNA, 338 bp, Homo sapiens
tttttactcatcaaaccatttgaatttaattgcattcttcaaaattctacagctacagattgcagcagagaataccagggactcagccagagaagaaagtactgtttttaaataaacagctcctggcagctctttattctagtccacattattcagatatcttcttttttcctctctttctttccatgtgtttgggaaaatttttccaggatgttttcagatgagtttgtgaacaatggccctagagtattctgtttttttccccttgaagcttctgtgacctgaagcatagattacttttatgcattggcttgttgctgagtttattcaatggtgcg

SEQ ID NO: 628 - DNA, 349 bp, Homo sapiens
tttctcggtcaataatttattagtaaaatatacatttctcattattaaagaataaaagctttcagccctgctgaacacacatctgaggtctcaagaaaaccagacaagatagctgactctcccacatagccctttccataaaggcgattcctaagcttaaacacacacaaagctggggctgtccctcttgaatcccatgggaaacaggccccaagatcaggggacctggagtcgggagcttggggtgcagtctgctcactgacaccctctcgaagagcacgcaggggaacctggtcctgggatggagtctttctggggatgcccacgtctgtgctgcctggaaccgggt

SEQ ID NO: 629 - DNA, 220 bp, Homo sapiens
tacaggtgtggcaaaatacttattacaaagaaagcaactgcaaccctagagaggggtaagccttctctgggcaatagtcatggacatttacagaggggaaggaagtaaacgttaataaataattctgtaaataaatgctagtacatcataataacataccacttagacactaccatggctttacagcaggttttctctaattcactggaaccatgctatt

SEQ ID NO: 630 - DNA, 400 bp, Homo sapiens
atttacaaatgtactaaaatttttaaaggagagaaactttaacaaaaatcttgataattaaaaattcaaattgtgctagatagaatgtattccaaaatttctgctaaaaatttttgcttttagtttgtaagacataattcaggagaacctcaaagaaaaatttagcaattaagtttggaaaagctataaaagagacctttactttttgaacagacatttttccctttcccaaaatgtgtattattcaagaagcatatttataaatttcattaaagaaaatatcggccaggtgcggtggctcacacctaatcccagcactttgggaggctaaggtgggtggatcatgaggtcaggagttcaagtgatctgcctgcctcagcctcccaaagtgttgggatta

SEQ ID NO: 631 - DNA, 233 bp, Homo sapiens
  misc_feature (1)...(233): n=a,t,g or c
gagtgtggggtcagtttattgggcatgcgtcagtcagaggctgggctggccagggtcgggtagggcagcagtttgtctggaccccgagaaacccaactggaatccagggcctcatctgnttcaaagccaaagtcttcctcaaccttaatctgcaccggggccagctctggagtcagcgcatttcctgctcggcgtccatcccgtggnactcgccgcctcttccgcccacttgg

SEQ ID NO: 632 - DNA, 413 bp, Homo sapiens
tacttttattagtctttttattcttcttttattgatcacctctgaagttcagtagcacactgcataattttttgcattagcatgctgttgtttctacctaaaatgaccggggtccttgccttctgcttcccatagagattgtcctgcaaaggaagtgtaagccattgtgttactaattcccagatttcccccacccagacattttcctaggagctggtctcagtcccatatccgcatttctcatccatggatgtccactcaaattaggtttcatcctggaccagtcattctaaatacagtgtgtgctacatggaaccccttgtttctaccccactctcaactctccctaatgctgagagacgtcccaccaaagaatgcatcatgagctccagccaccactgaacatttgtggc

SEQ ID NO: 633 - DNA, 467 bp, Homo sapiens
ttttaaaactaaaattggttttaataaaagttttggagtcatctaaatgagtaactatacacattcctcctctccagcaagtatacagaaatcttcccttactccaatttgacgctgcaaaatcatacatgcaccccaaactgatctgttattgaaatttctttttctggtctcacccattactttaacatatcagaggaattaacataacagcctagagaacagaaataagagataataggtgcttcagtaccacccaaattatctactaagaccacagtgtgggcaacagaatgcagattcatggtagtagttccttgaatgaaagagttcagacagaatcttccacaaacacaaatttttgcggtatctaaatcttggcagagatggaatggaatgatatgagagccatatggaatcctattatgtaatatggttcgtgcgaagattccataaagttaatggtg

SEQ ID NO: 634 - DNA, 395 bp, Homo sapiens
aactattattgttacagctttattcttggagttgattattaactaaatatttgttttgtgcatttacaacatggagttgctgctttaacactatttgaaagtgtacaaaaactgtcagtgataattcccataaatgtttcacaaaacagaattttagcatttatttaattataaaaatttcccatgattcttcaaaaagttctgtatcttttccattatttgctttacaaagtctagtagggtttccctgttgagaatgtttccatagtctccaaaaaaagaattttgtttcaaatcgtatagttcaaaacaaactcttctatagaagaggtgaatttccctggaagatggaaaaaagaacaatgcttggcatacagtagatattaaataaatat

SEQ ID NO: 635 - DNA, 172 bp, Homo sapiens
  misc_feature (1)...(172): n=a,t,g or c
gatcaagacatactcatccagtatgaccggacctggctggtagctgaccctacgtcgctgcgagtccaaaaagttggaggccagtgccgcgctcgtaccagaaatcctaccgataagccatcgtgactnaaactcactngtataataaacagttttgagggatttaaagttc

SEQ ID NO: 636 - DNA, 118 bp, Homo sapiens
gatcccagcattttccatcgacttgtaattgtttctgctacctgacaatcatcgccttgagtactgggacaacctttgattactcattatatcctcaataaatatttgttgaactaaa

SEQ ID NO: 637 - DNA, 405 bp, Homo sapiens
  misc_feature (1)...(405): n=a,t,g or c
agtacttctgcatcgcctgggttcagcttcgaggtgtcgtcgcgcctcctgctggcgcccagtacgcgcaacttcttctgccacccgctcaacctcatcgacattgtgtctgtgctgcccttctatctcacgctgctggctggtgtggcactgggcgaccagggcggcaaggagttcggccacctgggcaaggtggtgcaggtgttccgcctcatgcgcatcttccgcgtactcaagttggcgcgccattccaccgggctgcgctcgctgggagccacgctcaagcacagctaccgtgagtggggcatcttgctgctgtaccgggctgtggggtgtgtcagtgttctctggtgtggcctacacagctgaaaaggaggaggacgtggggtttnaacaccatcccag

SEQ ID NO: 638 - DNA, 356 bp, Homo sapiens
gtctttgctcactggatttttattaaacactgcaaatagaaaggtatgggtagaccttgcaccagctgcagccaaagagtggacttactcactggcttagttagcaccagtctcctccccaggtgctcttggcaaagccagtccccaaaggagcaggaggtatttcaagatgagggccagatcaggcactgaataaaaaggccaatggctggcaagaggtcaggatgtgtcagctccactgggaccctgggggctgcagtgaccgtctgcttgttctgtgctttgttttcggtttccccgtgcagctcggattgggaaaatgaaaccggagggaagccagatgaaaggggcaagta

SEQ ID NO: 639 - DNA, 553 bp, Homo sapiens
  misc_feature (1)...(533): n=a,t,g or c
cagtgtcaggactagtatattttattttcagatgcaagcagcaactttggcatttcttatcacaaaaaaactatatgagaaagctggcaanccagtgaacttcctggccggagaggtttttccattaaaggtggcaaggtttgatcatccaccatctttagagttagaccattgagttggacagatttggaaagtaatccatgaggtcccaaaggtcttagaaggtatttatccacttgcttgttagaaaaaggatagggtaaccgcaagtacttggtgacgttatggaggtttatggcatacagagttaaatctccttctttataccttggattgtcagtgtttgtgcaatgaaggtatactccgaagcttccttctctttgaaccttgcacgcttgccattaacaccttgggcccaccaatttcttgaacagaagagatagccaataatcaggtaaanggatcgaagttttcatccactaaatggnagttcctgctccaaagaatacttgcctcatcaccacttctaatnccattcgggctgacagccaat

SEQ ID NO: 640 - DNA, 496 bp, Homo sapiens
  misc_feature (1)...(496): n=a,t,g or c
acatttanttttattgtacatattcatggtggacaacatggtgctgtggtaaacatgtacactactgaaatgatggctgcaattaatatctccaacaccttccatggttcctttttgtatgtgtgtgtataagtgtgtgtgcatgggtgtgtttggataagtgtgtgtatgagtgtgtatgcatgtgtatgagtgtgtgtgtttgattatgtgtgtatgagtgtgtgtaaggtgtgtttttaattgtgtgtgagactgtgtgtatgtatgtatgtgtatgagggtgagtgtgtgtgtgtatgtgtgtgtatgagggtaagtatgtgtgtacgatgttagtgtgtgtgtatgtgtgtgtggtaggagcacctggagtcntctctcagcacacccgccacacacaacacctgactgtcaccngtagtccctgcactgtgcacnggactgctcggctccctctccnacacaaccgcaagcccctgacctcctcctcccc

SEQ ID NO: 641 - DNA, 406 bp, Homo sapiens
  misc_feature (1)...(406): n=a,t,g or c
ttttttagcatatccaaaaatggtattgctttattttttaaaaatattttttcttttttgaaatatcaatcgaatcaattttattctcacaacaatcctgagtaaatatttttaaaaaatatattttttgaggaaacagattaaaagctttaaaaaatgtgattcactgaaaatcaaatagtgaatacatgatagagtcagcactaaaaaggcagatatatcaaagagagactgaaataagcaactcattttttgcatcgacttcgaaacacctctttaccatcagtgtttgtaataatcattcttgatctttatacttcacatttcttggtaatccaaatgcttcataaatnctcttacacatcctgaatctcttgcttcattcagcgagataattccgggggag

SEQ ID NO: 642 - DNA, 368 bp, Homo sapiens
  misc_feature (1)...(368): n=a,t,g or c
taagagataaaattattttattggttcaaataaactgaaaaaaatagacatacaaatcacttagttgtaattttaaagaattcctcaaactaaacttgaatttaagcataagcttatgcttacagattactatttgctagcttactaattattatttgaattaagcagtaagaactaaaatttaagtttcttaggttttacagattgatttgaagggcatgctgtcttgctaatattgaaataaatttatttcttaaaaattattattttactggggttatgtcagaggcaggngctgtggttcttgagggnagggncaagtttcttctcagggatcntccaaaatgaaggctctcaccgttctgccc

SEQ ID NO: 643 - DNA, 416 bp, Homo sapiens
  misc_feature (1)...(416): n=a,t,g or c
gagacagagtttcgctctgtcgcccaggctggagtgcagtggcgtgatcttggctcactgcaacctccgccttctgggtttaagtgatcctcctgcgtcagctcccaagtacctgggattacaggtacatgccaccatgcccggctactctcctgaacacttaaaaaatattttattcataaggatatcagaggagaatattatccttatccataagcaaattatggataaaatatcagtattttatccattaggatatcaatgattatgatttgtaagatactacttcctcaaaattgaggatttttctgtcttgtgcattactcaggatatactaataaactaatcaataggattacttcaatatactaatcaactatccaaaaaggttgttccctaatggaaccacccttggn

SEQ ID NO: 644 - DNA, 328 bp, Homo sapiens
  misc_feature (1)...(328): n=a,t,g or c
cagaagtcatgtgggcacttattgttttgagtgcngtgaatgtgtagtttgatggactgtgatgtgttaggttggtgcaagcgtgattgtggttttngtcattgaaagtaatggtaaaaactgcaattacatttgcacccacctaatagattttctgcaggtgtagggatggttactttcaggaagtttgtcctattgtggatgctgagcgagacaatggctgcctgttcccatacattccctgcttggccacagccangttttgtccaggatttctgttgtacacagtacagttgcagctggattatgtgattggtttgaaattaaa

SEQ ID NO: 645 - DNA, 204 bp, Homo sapiens
  misc_feature (1)...(204): n=a,t,g or c
aacgtctctgncattttagtgtcatgttactgaaacttcccttccccagtggctcagttcagagccttctgtgtgaagtctttaaacaacggtgtttcagggtcctcaacagcaataagatgggacacctctcagggttctgcttgctcctatttcagtctcttctcactcaggngagtccatgcttcctactggttggcagtt

SEQ ID NO: 646 - DNA, 496 bp, Homo sapiens; identical to SEQ ID NO: 192
  misc_feature (1)...(496): n=a,t,g or c

SEQ ID NO: 647 - DNA, 417 bp, Homo sapiens
ttacctgtctgaagtcacattttacattttgaggaagggtacaggtaagggaaaagggcgggggagaaggattaatcttgtcagaaaactaaggtcagtagaataaaatacaagaaattaagttgacaaaatgaaacataatgagaaaaatttttttggacaaaaacaattcaaaatcagacttggctaataataccagtctgacagattctgagaactaaggagagccaattgatgttattttgcccagagctaaatatacttttcttaaaagtatgacagtatctggttcctctgaccagccattataataatctttgcaatacactgaacatacacatggaatacagaagtctctatttaaggtcaccagttaactaacttaataggcaataacgctagctaacagtaagacat

SEQ ID NO: 648 - DNA, 361 bp, Homo sapiens
gaattttcaattagttaatttcataagctacagcagaggcgtggaccctgccctctccacacttgaagagataagcccctgggatccaagtcccagcaaggttggtgccacccatcttggtgaaagatgctgttgttcctgtggaaaccatcaccagaggtaggaagggctttgagcccaaaaggaaacaagagggcgtgaatccaggccatcctcaggggagggtgggagcccatcccaggcagagaggcctaagcctcagtgtgggccaaggctcaaaggtgctggcacaaggcttcccagggggagaatcagaaactcagcagtgaaagtccgcagaagggggaagaagcaggctgat

SEQ ID NO: 649 - DNA, 412 bp, Homo sapiens
cacagtctgggggcccccgaagccccctcatctttattccagttcctcagatgtggcagttcccccagcttccctggaaacaagtatcagacaaaggtggtggcagacacaggacagggccctgggtggggcttgctggcgctaaaaggatttctcagcaggctcagggtctcccgccccgaatgacccttctggccacttcaagctactcctctgctgcccggcttccctctgcctctggttcccctggctgagcagggccttcctgggcttgaccctggcccccttcagcagttgtctcagactgttcccgaatgtccctggggctggctttgaccccagcatccccatctccctggcacccttgctcctcccctctgcttcttgcctctgactgcccactgcccttctc

SEQ ID NO: 650 - DNA, 170 bp, Homo sapiens
gtttttaaatccaggatcaagaccacaatttattatgtaagacatggggtgaagaatggtcaaggaaagttatggccgtgagtgacatggaattagatgaaaaggctcaagtttgctgaagagagtttaaatttggcttttgctcttggaaacgtcaaaataatcataag

SEQ ID NO: 651 - DNA, 178 bp, Homo sapiens
  misc_feature (1)...(178): n=a,t,g or c
cacagatatttttaggttttnagtagtggtcccgtcagacacaggcaaggattcaggctcggcctcccatgcgccaccctcgcccaccacactggggccggagcagggcggtcggctgcagcccccgctacttaaaggtggactgcagctccttgaaggccgntttccgctgcttcat

SEQ ID NO: 652 - DNA, 401 bp, Homo sapiens
tttttttgcagaatggaacatcctttatgacataatttctgcccaggaagcattgcacaagaatattagcatggtctcctttctgttgtatccattccaccttggtttctttccactcttttctaggaaggggtctttgtatggaggactgtttccaaagcacaaagactctatggtcttagcaaggcccaaacatttaagtctggatgatcttcttcctttgctgcagctgctctttgacatcctgcacagggtgatgggctggcggccatgggtgtgcctctgggcctgtcatctgtcgtgttgttagactgctgatgagctgtcgctgcttgtctttaaagtctgcacttctctcttttccaattttggctgccactagacaatgaaaatcaagcagc

SEQ ID NO: 653 - DNA, 452 bp, Homo sapiens
ttttttttttttttttttttgcccctttatgtatttatttatcaaaacactcgcaaacctgacctcactcaccaacacacacacacacaaccaggacacatgtgccaggccttatgaaaggctatcaagtactttgaaggacaggaaggaatgaacacacccaggtggacgtttggtttcatttgcaggggttcagggagggttgcaggggttcagggagggctcttgtcccacaaccggggaagggagagggcagagcaaggcaataaatagaaccctgggcccagcctgctttggtacattgtgggtgcatccctgcatgtggccttggcagcatctgctcccggcccttaaccatcagcaggagtcaggagggtggggcccaggcagctggtgcaggcaggccagatgtgcagcccaaggtccctccaaatagccctggagccctgcag

SEQ ID NO: 654 - DNA, 484 bp, Homo sapiens
tttttttttctgcaccaaaatacatacattcatttatttctcattgcagcaacaagataaacaagtataattccatggtcaaggagttacaaatagtagcaagcccagtaaccttgagcatatctataaggcaaataaaacaaatatttctttcatagtgtgggcatccaactttagataatctggaaaaaaatcactctagcccctgaataccatgatgtgcatgatgtgcaaaatgaaagtatcacccaaaatattttcaaagctaaaaagaaaatatttaaattcaaatactttaaccaaattggaaatgcaaacagtacacttagagtcatccttagccagctgttctccaaacaaaagatcgagaaacaaaaccaagaacaatgtaaaaaagaaaaggtttatctagaaaaactggaagctcatcaaagtcacatttcttcttctgattcttgttctcgttcagcatttttcagaagtc

SEQ ID NO: 655 - DNA, 404 bp, Homo sapiens
ccgagacggtccccagagagccaccggaggagcagctcacctgagagacggagccccggctcgcccgtgtgcagagcggacaaggcaaaatctcagcaagttcggacctctagtacaataaggcgaacctcctctttggatacaataacaggaccttacctcacaggacagtggccacgggatcctcatgttcactacccttcatgcatgaaagacaaagctactcagacacctagctgttgggcagaagagggtgcagaaaagaggtcacatcagcgttctgcgtcatgggggagtgctgatcaactaaaagagcagatcgccaaactgaggcagcaactacaacgcagtaaacagagtagtcgtcacagtaaggagaaagatcgccagtcacctcttcatgg

SEQ ID NO: 656 - DNA, 78 bp, Homo sapiens
gtaaatgcttaagagttttaatcagtccgccataaaaagctcctccccattctccatcttgggggctcagatcttggc

SEQ ID NO: 657 - DNA, 417 bp, Homo sapiens
tttaacctaacattgtttttatttgaacattctaagtgaaaactccgagtgctttcagttgctttattctctaggtatgtccctggggcacggaggaaaaggagagtgttaccattttaacgaggagaaaatgaagacccaagtctagaactaaagagccagaactaaaactacatctttggatttagtttatcctttgaattcattgtttagatcctattggttttaccaaatgcatactgtgtttaaggattcacagttgaagaaaaaataatctgagaataatagatttaaatctgatattagatttaaatctgagaatattagatttaaatatctaacatgtttcacgtagaactgatgtagccaattctttaagcatggctttccaaacatctaggtatataattgtaattt

SEQ ID NO: 658 - DNA, 413 bp, Homo sapiens
tttgtttgaaattaaatttattaagcactcactcacgtgtatattgtcctagacagggttgcgtttcagagaacaaagatccctaacacgatcatccagtcccgtcactacctgactccctcctcccatacaataacacattcccccatctctaggacatagggatcttagtcccctccccccacctttttcttcttcttttttgagacagggtctcgctctgtcacccaggctggaatgcctctttccctggttgtcaatattatatagcctggcaatgaaaaaagggtgaagttttacagttctaaagatccattctttattttggtacaaaaataaactgttcaacctgtaaattgtcacttattttcgtattgttgtaaagcaaacttacagaataggaacacctgcta

SEQ ID NO: 659 - DNA, 302 bp, Homo sapiens
tttttgtattaatccaaagcaaatatattttatttaattggattattaatagttcactaacatcatactgtaggtatttttcttttctataaatgttttatattccagtctattcaaaaccttacgaaccaaatcctttaaaggacgtaagtacacatattttcaaaccaacaaaatagtaaaattcagggaacattagatggaatagggaagatgaaataacgaagcaactaagagatttacaagaatggagttcttctgccaccttgtggttgttctgtgttataacctagagctacatt

SEQ ID NO: 660 - DNA, 415 bp, Homo sapiens
ttttaagtatttatatgtgatttttaaaatttttttatttttatcactttttaaaaattatactttaagttttagggtacatgtgttggctagctaagtgatataaaataagtgatttaaatatagactgggtgtggtggctcatgcctgtaatcccagaactttggcctcatttatgataaatatagtaaattcaacaaactactccaagcattcaagaattttaatctcataaagaaaatactgtatttctaaaaataaagataggcatgatttattactattcagataagatggctgcataagtcctgattttaattctgaaatctttctattaagaaagatcagaagacaggtagacagagagacggggctgctacacaaatataatgggaagactccttaagtttctata

SEQ ID NO: 661 - DNA, 212 bp, Homo sapiens
atgggagaggaattattttatttggatactttatcagagttatatatacttgaaaatttgtttagtaaaatagcagtccccttgtgtactcccagagtttcatcacatagaagcaattatttcgttatttatctccttatgtctaaatagatattattactttttgattttcaagtttaggcactacctctccttcacatacttgctcatca

SEQ ID NO: 662 - DNA, 420 bp, Homo sapiens
tatggatgaataacagatgaatttattagatttttttctcaaaactactcagcaaaatgtacaattcaattcccgtcagtaaaacatgaggcatttagtgccttatgtgatgttctaggcatttgggcagtttcttttcatttaggtgggaatttaagacattttcatatgaagctaggtaataaaatgctgtggcaacattcatatgtttaaatgtcctaagaattgaagaggcatcaaagcttatatcagaaaataaaaaggtaaatgcgggtttggagtgattcaggagatgtgtggaagaacttatgatctgaagcaggcttgagagaagaggcagaaaagcaaagctgtgaaggaaggataagtttggcaggttttaagatgattctgctgaaggcaaagaaatgagagatagta

SEQ ID NO: 663 - DNA, 320 bp, Homo sapiens
tttttttttttttcagaagaaaaaaatgtttaattaaattccaatgttcaaaactggatagtgtgtatggcaggtgatttgtacatacatgttactcttcatcaaaattgttttccatccctgtgacatcaatacaaactgcagctatttggttccaaaccatagcaagatacattctattttttaaaatgtaaatggtcatttaaaatagaaataattcttttagacgtactgcatttttacaaatgtgattttggaaatatattgctcgcaaagggtaattttaagagaattgttgagattctaatcccatctttatg

SEQ ID NO: 664 - DNA, 493 bp, Homo sapiens
tttttttgccagggcggaccgtctttattcctctcctgcctcagaggtcaggaaggaggtctggcaggacctgcagtgggccctagtcatctgtggcagcgaaggtgaagggactcagcttgtagcccgtgcctgagtagaacttgttctggaattccacccagtgcagccgcagggcgtgcaggaaggctgagagtccctccatcaccagcaggatagccacggtcatcacggcaaaggcggcaaagatggggaccagcaccacagccgccacgcccacctcccggcccaggcccaggcctatgcgcatcaccatggcccacagaacctcggacagctgggcgtgggccaggctcagggcccacaggcgcaggtaggaggcggtgttggagacgcagcccaggcagaactcgatggtgtggatggcctggtgcatgagcactccggaggggacgagctcgggctcctcttcatcatccaggccccctggctt

SEQ ID NO: 665 - DNA, 499 bp, Homo sapiens
tttttaaagcctaagcataccctgagaacaacaaccttttttgattagaacagaagaaaaagccagagtgttcttgggctgccaaaatattaatacgtttgtctcaaagacgagccacttaggtgcttgcttagagacttctactttacacagaatttgaaaagtttgacagctggctacttactctgcaaaacggaagggagactttttagaacagcaactggtgatctggcaaaaatgaaaagtagaacttgtgaagaaatgagatggacttggtgtattaatagctaattttagaagaccctgtggatattctaaatcagcataatagtgatgtctgagccatagtgttaaattatgattactgtatttgaagtataagaaggcagaaaagtgtgatgctgttagaaaaaaatctcatttcaaatgattgaaggttaaaaacaattggggaaagattagagagggcaggcggtgctttaagggaggtggaataata

SEQ ID NO: 666 - DNA, 208 bp, Homo sapiens
ttttatttttttttttttttagagtttgattgcctttattatgaatataaaatgtacatacaatacaatatacatttatacatttacagtttgcatttcctttcatcttttttgagcaaattcaattctgcatgtcccagtttgccgctccttccactgatttgcacttacactcatgacgttctcttcacttgggtactctgtgtac

SEQ ID NO: 667 - DNA, 543 bp, Homo sapiens
tttattttttttttttaccaaaaacgcaggggatttatttgaggtttgggtgaaaaataatcctgtgggtggtggtaggccgacagatggggacaggaagctgtggacgaaagccccaggtcccgtgggagaggtgacagcagcaggggcacgcagccacgtgggtccccaggggaatgtgaaggcggagggctccaggcgaactggggattaaacaaatatttacaggcagcagggaagtgcccagcgcacgtgacgggggcggggcgggactttggggagggcggggctaacggtatcgagcgagccggttgtagacgtggtccaggtttctgcacaggaatatcgagagcgtcatgaacccgagctcgagtaggccgacgcccaggcaaatgcccactatggaaataaggttgttgtgcagccacttctggaggcctgcgcccaccctcgcggtagatgtggctctctgcaggacagcgcaatgtctgcactgtgtctgggacgcgccagtgtccagcctgctgagctgggcaagatcac

SEQ ID NO: 668 - DNA, 470 bp, Homo sapiens
tttttttttttttttgagaaatcttgcacaaatggcattttattaaagaaaatctaatttacaaagctttgtaaattttaagaaaaacattcatagatcataaacaaaaatttcaatatgcaatattcaaatttacaagaaaataagcacaaacttttagacagtgcagttattgctgcactcctttaattccttatccagagcccaaaaaatgtagacaaaccctaaaaatgtagcagaagcatttccgcacactggtgtccagaatctagtttgtgcagaaatgtttccactagatttatagagtactcttcagaagaaagaggcgagggctcgtcatttggtcaccctttggacattttgcaactcttcaatgggtttccattgttggttgattgttataagcttttgaggtacagtagggtccacagtttcccaaggttctggatttttttttcgatcaaggatca

SEQ ID NO: 669 - DNA, 147 bp, Homo sapiens
  misc_feature (1)...(147): n=a,t,g or c
gatcttcaatgcctctaagtcattgtaataaaaaatcagttatcactataccatgctataggagactgggcaaaacctgtacaatgacaaccctggaagttgctttttttaaaaaaataataaatttcttaantcaannnannanaa

SEQ ID NO: 670 - DNA, 306 bp, Homo sapiens
  misc_feature (1)...(306): n=a,t,g or c
ggaaggggaaatgtaacgtgtctaagaaagtaagacaagcatcatattaaaaaaatctcttcgaggagcctagaggaaatcctatttttnatgcatttttaaactttttgtcatattgctttatttttccattttcacagcagaaaaaatcaagtctacgtgactacataaaagangtttgntcaaacagtgagacgggagcctccacatatgcacatccaggttgcttaaattcaccaattgctcattggaaaccacatctcaactcggtcatattgcttttagtggtttgtttctctgtagaga

SEQ ID NO: 671 - DNA, 414 bp, Homo sapiens
  misc_feature (1)...(414): n=a,t,g or c
aggggtgggggtgtgtgtgggtgtgtgtgtgtgtgtttaatatgactatgtgtgatgtgcattagaaaatcagcaagtaaataactgttgctatgtattgtgagaaagatgggaccaggccaagaaacacaattaaaaggtggccctgggcccactgctttcctgggaagaacagtatctcataagcttgtgggtctcgtaggggtatggactgagctgcttagtggtaggaaaaatcaccaggggcagtgaaactgaagtcccagctacatttcccagctacgtaaatgttgatcctttagatctgggccatttctgcagtntcaatccacccactgaggcccagccctaaggaggaaagactgtgatttgtaaggtngatacactgacaanaataatatgagggagggnatt

SEQ ID NO: 672 - DNA, 282 bp, Homo sapiens
  misc_feature (1)...(282): n=a,t,g or c
tccatgcccatcagggtttattgtttctgtaacagcggccacgcctgggggntgngtgttgcagctggagatctctcagcaccttgggttgggggcggggctgggcgggacatgggatggaggcggtgctgtggcagacagggtggaccttggggcctgcaggaggagatgagttcggcggccacagtggcccccagcagcagcagcagcagcgngaggttcagcgggcgcgntcaccgcaccaggtggaaggtgagccagtacatgagcataggntgcgcg

SEQ ID NO: 673 - DNA, 409 bp, Homo sapiens
atttttattgttattgataatacattagacattaccctcccatcaggtgcacagaagaaagtcaaggctggaatttcattctcttatctaaatctctctgttctctctcagggaatattttcagagaataggtggaatgaagtgaggctgtggagaatgttatctatgataggatagagggcatagaaggccaggagtcaggagacctgggttctgtcctggattatacaccagctcactgaggagctttgtcttctctggatcaagagtcccacctgaaaatgaaggaactggtccagataacactggagccctttcccccaagatgcactggcattcagaggatgggtgcaggtccagtcctcttctgcctgtggggtggatgctggcttggaagtgtgctgggtct

SEQ ID NO: 674 - DNA, 235 bp, Homo sapiens
  misc_feature (1)...(235): n=a,t,g or c
tttttttttttaaagataaaattaatttatttgacttcacaacttcattgggccacacaggggccnacangtcctacgaagcacaaccttgtggaagtgggctggggaggcagttctctggactgcctgctcccttgtccagagctgccttgagccaggtccctcctgaccccatcatcctgttcccatatgcaagggctgctcaggtccacctgcaataaacccaggnctgcct

SEQ ID NO: 675 - DNA, 309 bp, Homo sapiens
tttccaggtttggaacataaattttatttaactttcacattgacacaatcaggaaaccattctgagaaaaggtagaggccgccttgaagcgaagcctggctccctcctccaccccgggctcgggggaaccatgcaggctcaggctggcactcatcccaggaaactgtcccagttctcagcggtcctggttgtggacggtatctgaaatggtcgttgcggtttgccctgcaccagggcctaccttgttgccaggaagccgcactgctggaggctacctgggcgctgggttttattgctggtgaactttgg

SEQ ID NO: 676 - DNA, 439 bp, Homo sapiens; identical to SEQ ID NO: 205
  misc_feature (1)...(439): n=a,t,g or c

SEQ ID NO: 677 - DNA, 2334 bp, Homo sapiens
agacacctctgccctcaccatgagcctctggcagcccctggtcctggtgctcctggtgctgggctgctgctttgctgcccccagacagcgccagtccacccttgtgctcttccctggagacctgagaaccaatctcaccgacaggcagctggcagaggaatacctgtaccgctatggttacactcgggtggcagagatgcgtggagagtcgaaatctctggggcctgcgctgctgcttctccagaagcaactgtccctgcccgagaccggtgagctggatagcgccacgctgaaggccatgcgaaccccacggtgcggggtcccagacctgggcagattccaaacctttgagggcgacctcaagtggcaccaccacaacatcacctattggatccaaaactactcggaagacttgccgcgggcggtgattgacgacgcctttgcccgcgccttcgcactgtggagcgcggtgacgccgctcaccttcactcgcgtgtacagccgggacgcagacatcgtcatccagtttggtgtcgcggagcacggagacgggtatcccttcgacgggaaggacgggctcctggcacacgcctttcctcctggccccggcattcagggagacgcccatttcgacgatgacgagttgtggtccctgggcaagggcgtcgtggttccaactcggtttggaaacgcagatggcgcggcctgccacttccccttcatcttcgagggccgctcctactctgcctgcaccaccgacggtcgctccgacggcttgccctggtgcagtaccacggccaactacgacaccgacgaccggtttggcttctgccccagcgagagactctacacccgggacggcaatgctgatgggaaaccctgccagtttccattcatcttccaaggccaatcctactccgcctgcaccacggacggtcgctccgacggctaccgctggtgcgccaccaccgccaactacgaccgggacaagctcttcggcttctgcccgacccgagctgactcgacggtgatggggggcaactcggcgggggagctgtgcgtcttccccttcactttcctgggtaaggagtactcgacctgtaccagcgagggccgcggagatgggcgcctctggtgcgctaccacctcgaactttgacagcgacaagaagtggggcttctgcccggaccaaggatacagtttgttcctcgtggcggcgcatgagttcggccacgcgctgggcttagatcattcctcagtgccggaggcgctcatgtaccctatgtaccgcttcactgaggggccccccttgcataaggacgacgtgaatggcatccggcacctctatggtcctcgccctgaacctgagccacggcctccaaccaccaccacaccgcagcccacggctcccccgacggtctgccccaccggaccccccactgtccacccctcagagcgccccacagctggccccacaggtcccccctcagctggccccacaggtccccccactgctggcccttctacggccactactgtgcctttgagtccggtggacgatgcctgcaacgtgaacatcttcgacgccatcgcggagattgggaaccagctgtatttgttcaaggatgggaagtactggcgattctctgagggcagggggagccggccgcagggccccttccttatcgccgacaagtggcccgcgctgccccgcaagctggactcggtctttgaggagccgctctccaagaagcttttcttcttctctgggcgccaggtgtgggtgtacacaggcgcgtcggtgctgggcccgaggcgtctggacaagctgggcctgggagccgacgtggcccaggtgaccggggccctccggagtggcagggggaagatgctgctgttcagcgggcggcgcctctggaggttcgacgtgaaggcgcagatggtggatccccggagcgccagcgaggtggaccggatgttccccggggtgcctttggacacgcacgacgtcttccagtaccgagagaaagcctatttctgccaggaccgcttctactggcgcgtgagttcccggagtgagttgaaccaggtggaccaagtgggctacgtgacctatgacatcctgcagtgccctgaggactagggctcccgtcctgctttgcagtgccatgtaaatccccactgggaccaaccctggggaaggagccagtttgccggatacaaactggtattctgttctggaggaaagggaggagtggaggtgggctgggccctctcttctcacctttgttttttgttggagtgtttctaataaacttggattctctaaccttt

SEQ ID NO: 678 - DNA, 2530 bp, Homo sapiens
ccgtgcagtccgagatgggctcgtctcgggcaccctggatggggcgtgtgggtgggcacgggatgttggcactgctgctggctggtctcctcctgccagggaccttggctaagagcattggcaccttctcagacccctgtaaggaccccacgcgtatcacctcccctaacgacccctgcctcactgggaagggtgactccagcggcttcagtagctacagtggctccagcagttctggcagctccatttccagtgccagaagctctggtggtggctccagtggtagctccagcggatccagcattgcccagggtggttctgcaggatcttttaagccaggaacggggtattcccaggtcagctactcctccggatctggctctagtctacaaggtgcatccggttcctcccagctggggagcagcagctctcactcgggaagcagcggctctcactcgggaagcagcagctctcattcgagcagcagcagcagctttcagttcagcagcagcagcttccaagtagggaatggctctgctctgccaaccaatgacaactcttaccgcggaatactaaacccttcccagcctggacaaagctcttcctcttcccaaacctctggggtatccagcagtggccaaagcgtcagctccaaccagcgtccctgtagttcggacatccccgactctccctgcagtggagggcccatcgtctcgcactctggcccctacatccccagctcccactctgtgtcagggggtcagaggcctgtggtggtggtggtggaccagcacggttctggtgcccctggagtggttcaaggtcccccctgtagcaatggtggccttccaggcaagccctgtcccccaatcacctctgtagacaaatcctatggtggctacgaggtggtgggtggctcctctgacagttatctggttccaggcatgacctacagtaagggtaaaatctatcctgtgggctacttcaccaaagagaaccctgtgaaaggctctccaggggtcccttcctttgcagctgggccccccatctctgagggcaaatacttctccagcaaccccatcatccccagccagtcggcagcttcctcggccattgcattccagccagtggggactggtggggtccagctctgtggaggcggctccacgggctccaagggaccctgctctccctccagttctcgagtccccagcagttctagcatttccagcagctccggttcaccctaccatccctgcggcagtgcttcccagagcccctgctccccaccaggcaccggctccttcagcagcagctccagttcccaatcgagtggcaaaatcatccttcagccttgtggcagcaagtccagctcttctggtcacccttgcatgtctgtctcctccttgacactgactgggggccccgatggctctccccatcctgatccctccgctggtgccaagccctgtggctccagcagtgctggaaagatcccctgccgctccatccggatatcctagcccaagtgaagcctctggggccccagctagctgaccctgaagttttcctaccccaaggagagttactcgacagtccataagtcaactgttgtgtgtgtgcatgccttgggcacaaacaagcacatacactatatcccatatgggagaaggccagtgcccaggcatagggttagctcagtttccctccttcccaaaagagtggttctgctttctctactaccctaaggttgcagactctctcttatcaccccttcctccttcctcttctcaaaatggtagattcaaagctcctctcttgattctctcctactgtttaaattcccattccaccacagtgcccctcagccagatcaccaccccttacaattccctctactgtgttgaaatggtccattgagtaacacccccatcaccttctcaactgggaaacccctgaaatgctctcagagcacctctgacgcctgaagaagttataccttcctcttcccctttaccaaataaagcaaagtcaaaccatcatctggaaacagtggccacttttcactgacctctcttcgacatctagtcaacccacccaatatgccactgggtttcgctcccaattccaccccaccctccattacagagctcaccacgccctcctagatcaccgtccccaacacacccattgcctctcaaggcccttatctcagccccttcctgtggccatttccctcagtgcccagatgattccctgggtgagggagacactggggcaccctcagaggttggagcaggctccctgctgtccctggatcctggacagatggctcagtaaactgtgggactaggtgcagacttttgccttcttggagtcctgggtctcctctgagaggtctgggtggtgctcctcctacgcctctagaggtctctgtgttcctcattttccttcaaaagcgggctgtatttctcttctaccttccagctcctcccacagaggaggaagacaataaatatttgttgaactg

SEQ ID NO: 679 - DNA, 4913 bp, Homo sapiens
cagctgctctggtggtctctcccaggctctgggggcggacccatgggaggggctgtttttgtacaaagctgtaacattgtggggacagggggccacaatgattcaactctacgggaaacctttacaaaaacctctctggcggtcccaactcccagagtcctcttctttcctcctgggtcacaggtcttaatgcaatttggttcagaatgcctctgcctcactcctgatcacatgtcagaccaagactgtggacaaggacaggcccagatgagaactaaagcttcccaggcagagagaggtcagacataagaagactgcctcaggaacctcacaagtggaggactcagggagggtcccaatccccaaaaattgagacaaagtcaggtggaaggttcatcggaggtgaccagctctccagaggactcgggaagaagtcaggggtatctatagatggagtcacaggttctgggcccctgccatcctctgcaggccatgcactttccctttcgatggaccctcacagagggagcatctgaatggggcatcctttgaaaaaggaacctaggaccctgtggatggactctgtcattctccatggtcctaaaaagcaaaagtcaaagtgttcttctgtgtaatacccataaagcacaggaggagatttcttagctcactgtcctccatcctagccagggccctctcccctctctatgccttcaatgtgattttcaccttgacccctgtcactgtgtgaacactgaagctttctttggacaaggcaccagactcacagttgtaggtaagacatttttcaggttcttttgcagatccgtcacagggaaaagtgggtccacagtgtcccttttagagtggctatattcttatgtgctaactatggctacaccttcggttcggggaccaggttaaccgttgtaggtaaggctgggggtctctaggaggggtgcgatgagggaggactctgtcctgggaaatgtcaaagagaacagagatcccagctcccggagccagactgagggagacgtcatgtcatgtcccgggattgagttcaggggaggctccctgtgagggcgaatccacccaggcttcccagaggctctgagcagtcacagctgagcccagggtgatggggcagaagagggaaggggagggggcctctcctcatagttccctgagatagcccagagaaagcccggtgggtaatgaatgagccacaacacctctccatctatctgcttcactgacagaggttctctgtagattcttcgtatattcctgtgctggattttataggaggccactctgtgtctctttttgtcacctgcctgagtcttgggcaagctctggaagggaacacagagtactggaagcagagctgctgtccctgtgagggaagagttcccatgaactcccaacctctgcctgaatcccagctgtgctcagcagagactggggggttttgaagtggccctgggaggctgtgctctggaaacaccatatattttggagagggaagttggctcactgttgtaggtgagtaagtcaaggctggacagctgggaacttgcaaaaaggggctggaatccagacggagcctttgtctctagtgcttaggtgaaagtgtatttttgtcaggaaggcctatgaggcagatgaggaggggatagcctccctctcctctccactattttgtagactgcctgtgccaagttaggttcccctactgagagatgggtagactcagcttggaaggggtcaccttgaacatctcctgtctccttgaagggtgccggtccacggccatgacagataaaagagcctctgaccttaccaccacggtcctaccgtttctctccctcacacagaaaggagaaggtcacagaagagggaacttgggggatcacacggggcctaattggtctgctgaccaccgcattttgggttgtaccattgtctacccctctacccaccagggttaaaattctactaaggaacaggagaggacctggcaggtggacttggggaggcaggagtggaaggcagcaggtcgcggttttccttccagtctttaatgttgtgcaactaatgaaaaactgttttttggcagtggaacccagctctctgtcttgggtatgtaaaagacttctttcgggatagtgtatcataaggtcggagttccaggaggaccccttgcgggagggcagaaactgagaacacagccaagaaaagctcataaaatgtgggtcagtggagtgtgtggtggggccccaagagttctgtgtgtaagcagcttctggaaggaagggcccacaccagctcctctggggtttgccacactcatgatgcactgtgtagcaatcagccccagcattttggtgatgggactcgactctccatcctaggtaagttggcagaatcagggtggtatggccattgtcccttgaaggcagagttctctgcttctcctcccggtgctggtgaggcagattgagtaaaatctcttaccccatggggtaagagctgtgcctgtgcctgcgttccctttggtgtgtcttggttgactcctctatttctcttctctaagtcttcagtccataatctgcctcctcactcccttcttggctcatcctccctcttatgtgcatggctctgcctctcctaagcctcttcctcttgcgccttatgctgcacagtatgcttaggcctttttcctaacagaatccctttggtccagagccatgaatccaggcagagaaaggcagccatcctgctgtcagggagctaagacttgccctctgactggagatcgccgggtgggttttatctaagcctctgcagctgtgctcctataattcacccctccactttgggaatgggaccaggctcactgtgacaggtatgggggctccactcttgactcgggggtgcctgggtttgactgcaatgatcagttgctgggaagggaattgagtgtaagaacggaggtcagggtcaccccttcttacctggagcactgtgccctctcctcccctccctggagctcttccagcttgttgctctgctgtgttgcctgcagttcctcagctgtagagctccttgcttagtcttcagggctgtgtgtttctttgctcttcttttcattgttttctgggactcttctcatctctactttcttagtggatgtattgttttactttcccttttttaaattgcatcttctccattttttccttcccattctaactccacttctgcattgttgactccttttggtgactagctctgtcttctatgttaagattctccccactgccagcctccagcacagaactctgctcatgtcttcatctccctccttctttctttctctaccagtcttagaagatgcatctatgtcttcctgaggtagtttgaaggttcatgagccaggcatgaccaggttggggagacaggtggtttcagggttgctcttgaggcctgagggcagaagtccctgtcacagcattgggcgagctgcagggagtctctgaggtgcctgtgtttggcaggtgtttgggagataggtctgaagagagtgttacaactggaaactgacattatcttagcaacagataaggtataaagaagacaaaatgggtaggagactctattttctttttttctgagacggtgtctagctctattgcccaggctggagtgcagtggcacgatctcggctcactgcaacctccgcctcctgggtttgagcgattctcctcccttggcctcccgagtagctgggattacaggtgcctgccaccaaacccagctactttttgcatttttagtagagatagggtttcactgtgttagccgggctgttctcaaactcctgacctcgtgatccgcctgccttgggcctcccgagtagctgggattacaggtgcctgccaccaaacccagctagctttttgcattttttagtagagatagggtttcactgtgttagccgggctgttctcaaatctcctgacctcgtgatccgcctgccttggcctcccaaagtgctgggattacaaatgtgagccactgcacccagccaagactccattctcttaagcctcagaatctatgctagaacaatagggtaaaggccccaccaggaagccctagtacaaccttccccatgctggggaggaagcagacaggcggtggagcggggttgggatgggatgaggtctaggatggagacatagacaagggtggaggaatgggactcatagggtctaccaaagtttaggggcttgggcagacattagtgtaggtggggacacacaccaagacgttgagtggaaagtacaaatcaccagattcaaaggcctgggttcaaggggctgtggtgggggaggtgtgcaatttgaaaagcaacttaagctgcctcctctctaagacatagaaacagaagagactaacttatatgaaaatcctttgtaaaggattttgtaaaggactcaacttgtggtgacaatccttttcattcctgttgtttatgatcactaggtcacagggtttgcctttttccaaacctgcatctcaattttcccatcaaaaacatttcccaaatttggataaagaacccatatctagacttgccacatttctgcaccaaaagctcactctcatggttggaacagagccaagcaaagggcacagtaaattgtggtttcttccactcctcatgtgtcttcagatgaaatcattctttccaataatcccagaaattctttctctcctctctcaagcatgtgaaaaggtccagagctctgcagtgtgagctttctactgaaatggcccttggactttgtggttcattcatactcagtggtctagcttgtactacttttgagaatgcaaagctt

SEQ ID NO: 680 - DNA, 13500 bp, Homo sapiens
  misc_feature (1)...(13500): n=a,t,g or c
aagcttccttcttggaattccaaactaataaatgagctaactccgccccagccccttagtccctccctgcaatccacctacctctgcagacatcttcttccaaggaaccttgcttgggaaacccacaccagacacatccatcatggcgtctacagccgcatgggcgtgcgtccctctgtttatatggccagagccccgcctcgctccgcccctttaaacttggtgggcggaccgaggcggggctcagaccaggccccaccccgatcagccacgtccatcgccctgatttccaggccctcccagtccctgggcgcacgtcccggattcctcccacgagggggcgggctgcggccaaatctcccgccaggtcagcggccgggcgctgattggccccatggcggcggggccggctcgtgattggccagcacgccgtggtttaaagcggtcggcgcgggaccaggggcttactgcgggacggccttggagagtactcgggttcgtgaacttcccggaggcgcaatgagctgcattaacctgcccactgtgctgcccggctcccccagcaagacccgggggcagatccaggtgcgggggccagccctgcgcgtggctggggatgaggtggtcgtggtgatagcctgtgtccaggcatccgcgcagggcgggccctcaaatgacctcaccttctctcctaggtgattctcgggccgatgttctcaggaaaaaggtaatggcttcgcggggctggggtggagctccttcctcttctccggggaccccttgtccctcccctcccctcccctcccctcccctcccctcccctccccttccctccccttcccttccctccccttcccttcccctagaaggaccagcacagcctcctacagctcccgcccggggtgctcctcccttgaattcagtccaggaggaagtctctgccctcttctgcccaggccaagcccctcgtcctgtgtggacgccactccctcctggagctggtgacagctgcttacagcttagctgtcttccccaccaagtcctctgagaaggtggcaaccagttgtgtcccctgtaggccaggcctttttgtacacccctattcaatgtggctgtttccttctaaggccaaggaaacgtagtcgctttctaaaccaaggagtctgaagccgtggagcctctgctctcctgaggtgatagaaccattccctgacccgggtggggctagtgagtttcttgagtaaactacccacgcaccattctttttgttttgtttttgttcttctagaggtaggatcttgctatgttgcccaggctggtctcaaactcctgggctcaagcaattctctcacctcagcctcccaagtagctgggactacaggcgtgcaccccccccgcctccacccagctaattttattttatttttatagagctggggtcttgctatgttgcccaagctggtcttgaactcctggtctcaagcaatcctcctacttcagcatcccaaagtgctgggattacagatgttagccaccatgccctgccccaacattcttttatggccctggggatcacttcagctcaaaccccttgctcaggaagatgtggctcagagttggacttcttggacccagaagcaagtgcttttgacgctgcacacaaagactttctgaaattaatttagaaaagctgtatgccaggtgtggtggcccacgcctttaatcccagcgctttggaaggctgaggtgcgttgatcacttgaggttaggagtttgagaccaccctggtcaacgtggtgaaaccccatctctactgaaaaaaaaaaccaaaaattatctgggcatggtggcagcctcctgtaatcccagctactcgggaggttgaggcaggagaatctcttgaacccggaaggcaggggttgcagtgagctgagatcgctccactgcactctaacctaggcaacagagcgagactccaccccaaaaagaaagaaagaaaaactctgaactctgggaacaactctgggatgaggttactttggaatgcagtcgcaggttccctctacatgtagcctttgcttctgccttccccactacatcttggagaaggttactcctcccacacttcctgggaccacctgagtaccattcctggacctcttccccatagagaattctgacttccaaccctctttgtagggatattataccctgcctgctctgccctgctcttttctggctgtggtgggctcagtctgcataccactagggacaatgaggagccaggcttgttggggaggggtctccttctcccactcctcccgccgtggacctcacctgaccctctctcctcttgcagcacagagttgatgagacgcgtccgtcgcttccagattgctcagtacaagtgcctggtgatcaagtatgccaaagacactcgctacagcagcagcttctgcacacatgaccggtcagtccctgccccctgcagtcctgtccagtggaaaatcacaaggcacaggacacactgttaggactctctttaatggggatggttaatcatttgaacattgaatgattcaaatcagcacactttccaaggtgcttggcaaggtagcgcacactctccactccctgggctggagccagtggttctccactgagggtgattttgccgccagggtccatttgacaatgtttgaagacatttctagttgttgcaactggaggggggaggggatgcttttgggctttaatgtgtagaaatcagggacactgctgctaagggtcctatggtgcagaggacggcccccatgcaagaacgagctggccccaaatgtcaggagcctgccagtgttcagaaactctgccgtagggtttcagcttcacacaggctgcagactggtttggtttggcctgcacgttgatttttgtttaattttttagttgtccgttgttggctggctcccccgtcacctggcagccttcacgcttccctgttttatgtgtagctgtttgagctcgctggacatttccgcctgcaacctcagtttgggagttaaattcacttccttggcagcagatgtgggcccgatgtttctgagcctgagacgctttgcttggtcctctggacttgtccacctgggcacccagtggcaaagccatgctgtgccacacattatagggcttcagcctcagagccctggctgggagctgtatccgagagttgctatggctgtgcagagaacagatccacccggcgtgtggccttcggtgggagctgaggggctcctgaagccagatgctggtggagtggagggtgcttggggcttggagttgcatgtgggaatttaaccgcaccttcgtgaccatgctgtctgatgtaggtcatttacttttccaaatttgcttcctcattcctaagatgcgatgtccacggcacagggtggtgttacacctggtggggacagggaaagcagaggaggtcacttcgttccagctgttggaagtacaacttctggagtcagtcagatccgggattaaatatgagttctgcccgtgtgtcacaagtcatctctaacacgggccacagaggccaaggctgggccagcagcattgatggctcgagaggctgcccttgcaggggccacagctggcctcccacctgccctcactttgtctttctctgtttagggagggaagagggaatttaaaatgcccaaaatactgtttcacacattctttccagaactcgaagtaggattatagcaaggtaataacgaaacaatagttgtaaagtatgtttttttgtttgtttgttgtttgtttttgggacagggtctctctctgtcacccaggctggagtgcagtggctcaatcatagcttactgttacgtgaccccaaacccttgggctcaagtgatcgtcccacctcagccccctgagcaggtgggactacaggcgcacaccaccacacccagttaatttttacatttttttcacacagtgtctcgctgtgttacccaggctggtctcgaactcctgagttcaagtgatcctcccgtcttggcctccccaaagattacgggcatgagctgctgtgtctggccagaatacaggattttaaaaatttatgttttgcaacataattaatataaagacaaatataacccaggcccagttctagttattcattcttctgaattttaaaaggaaacatttggctggcccctaatggtatcatgggccctggtacctgatgaagttggcctagtctgcccccagctcctgaacagtggaagagtttttagtctcattgagctttgtactggacattactaatttctaatccaaagcatcaagtgaagtggcttgtataaataactggttttcctctgggaggctaaggcgggtggatcacttaaaagttaggagtctgagaccagcctggccaacatggtgaaaccccatgtctgctaaaaatacaaaaattagctgggtgtgatggtgtgtggccagtagtcccagctactcttgtggctgaggtgggagaatcgcttgagacccttgagaattgggaggtagagattgcagggagccgagatggcgccactgcactccagcctgggtgacagagcaagactctgtttcataaaaaataaataaataactggttttctggacgagggcctttcccataggtgctaacttctcaaagcccggctgggtgaacactgagcctgctttgcaggtagcaggtggtcacgacagtgccattccctggcccctgcattgtggcttctggcctccctggccctgctcacgctctggctttctcttcccaggaacaccatggaggcgctgcccgcctgcctgctccgagacgtggcccaggaggccctgggcgtggctgtcataggcatcgacgaggggcagtttgtaagttggcttgtcttggcatcactcttcctgccttccgctgtgtcctcccgttttccctcgctgacttggaagttatctganncttttagtaaaataacaaggttaaatagctacaactagtgttggaataccctctgaaggcccctttctagtttccctgtcatagtgtcatagtcttgtaggattcgttttactttttttttttttttttttgagacggagttttgctcttgttgcccaggccggagtacgatggcacaatctcaccgcaaactttgcttcctgggttcaagcaattctctcctgtctcagcctcccgagtagctgggattacaggcatgcgccaccacgcccagctaattttatatttttagtagagatggggtttctccatgttggtcaagctggtctcaaactcccaacctcaggtgatccgccccgccttgaactcccaaagcgctgggattacaggcatgagctaccacacctggccattgtacctttttaaaaatacatatatctatttactggcaagatgcagtgactcacacctgtaatctcagcctgtgggaggccaaggtggacagatcacttgagcccaggagttggagactcacctgggcaacatagtaaaaccccatctctaccaaaaaaaaaaagaaattagccagtcatagcagcgcacacctgtggtccctgctactcaggaggctgaggcagaaggatggagcctgggaggtcgaggctgcagtgagtggtgatagcaccactgcactccagcccgggcgacaaggccagaccctgtctcaaaaaaaaaagggggaggtggggagtaatgtttggtttgcctcatggttccttttgcttgtttcttatacgtttattttcttgttgttgaagtaccttttttagtagtttttgcagccaggaggtatagatgggaagctgccagtctttgtatggaaatctttcttttgtcatctagtttaagctgggcagcaagaggtaggttgatcttgtgtgggtttgggtttttttttttttttgagacggagtcttactctgtcgcccaggctggagtgcaatggtgtgatctcggctcactgcaacctctgccacccggattcaagcgattttcccacctcgcctcccaagtaggtgggattacaggcacccaccatcatgcctggctaatttttgtagagacaagggttcaccatgttggctaggctggtcttgaactcctgacctcaggtgatccacccgccttggcttcccaaagtgttggaattacaggcatgagccgccgtgcccggccttttttatttttattttttttgagatggagtcttgctctgttgccctggctggagtggagtgacgtgatcttagctcacagcaacctccgccttttgggttcaagcagttctgcctcatccttccgggtagctgggatcacaggtgcgtgccacatgcgtamtcatttatgtatttttaatagagatggggtttcaccatgttggccagctggtctggaactcctgacctcaggtgatccgcatgcctcagctcccaaagtgctgggattacaggcgtgaaccacgcctggtcttgatcttgttgctttgaaaagtagcagcgctggtcattgtgtttttgctcagaggaaggccgccatctctctaatgttacctctggtcaggtattctatctgttctctctcagcacaatgtgtgtaggggaagctttgtttcatttatcctgctttatagctggtgtgccttttcatttctggggaaggaatgaagccattatcacttcaggtatttctctcctcatccatctctgaggtgttctgggttccatcttccagagtgtgttttgtttcagtgactatttttacatctgctgctctaattcatcatgctccgttttgtttgacaagttactgttgggttatttttaaatttatgctgttccttccattatgttcctgaaaatcttttcttagacttttccagatttttctatttcctcaggaacatattctgtggttgagtttctgggttattttctgttatcttagttttctttcctctgctttggagattttatttttgttagtttatcacaaagaatgaaactgaaactctctccaaggggtttagcagacttgacctcttaggtacttttagggttgcctcgaagtacacaatgtggtggtttgatataaacataacaggaatttatttctcgctcacagaccccctacgtggttccaggccggttgatggggaggccgcccacgaggcggcttaggtcgccctggctggctgtatacagacacggaggggaagagacgtggcggagcccctgggtgtgaggttttcatgggcctgaccagaagctgcaaacgtcacttctgctgatctttcaaagactagaacctgggcacagggccacctatacgtttagtatacttagtccagttcgttttttgtttgtttttaaaaacagtcttgctctgtggcccaggctggagtgcagtggcgcagtctcggctcactataacctccatgtcccaggttcaagtgattctcccgcctcagcctcctgagtagctgggattacaggcttctgccaccatgcccagctaaccttttgtatttttagtagagacggggtttcatcatgttgaccgggctggtctggaactcctaacctcaggtgatctgcctgcctcagcctcccaaagtgctgggattacagcgtgagccaccacgcctggccacacttagtctagttctataccctggaggaagaataaatgagtttgtttggtgagtgcttcaaggtctctacccgccctgcctcccagcacagagccaggccgctctggcctgaataccctgcccggacgtcacagggcctgtcccctcaaaaggccagtcctgccttcctggttctgttcttgcccaacattctgtatgagtcacagctgcaaattccattcccgtggggaggctgacgggtcccttcccctgtgcggggcatctgccctgtggagttgaggctgccagtgtccgctctgggttcccgaccacccggcagctggcatctcctccccgcttgggtatggccattccgtttctgaccttcagaggtgcgcccctgagcacccccatgcctctgcgtacgtggagacgtcgttgttgctgccccgtgcttgagggactcctggcgagaaagtgagcccaggctgggaatagggctgcagctgttctcttttgctcccaaactgtggcctcagaatgcatccagggattttgcatcagctttggggacatggccctctcagaacaaggaagcttcagctttggcaaggctctccctccttcagacctgccgctgtgagttgttcaatagctctgttctcctggctctgcgtaaaccttgttgacagaggctgacccagacccccgaggcagaaacctttcccttctccttcctcgacatccaaatgccctgagtcaggagccagcgtatgaagtcctgtcccctgttcagcctgtaggagggatttctcggtctacttcctccctggccagcaagtaaaacttgagttcattcagtgagtatttattacaccctacccagacatcagcattctgccctggcctctgtgtgcccttgttctcttcaagaagttccgggtcaccagcctgaccaacatggagaaactccgtctctactaaaaatacaaaaattagccgggcgtggtggcgcactgcctgtaatcccagctacttgggaggctgaggcaggagaatcgcttgaacccggtaggcgaaggttgcagtgagccaagatcgccccattgcactccaagcctgggcaacaacaagagcaaaactcagtctcaaaacaaaacaaaacaaaagaagttcagggtcttcccattgcaagcagttctagatcgaggagaggggttcctagcatgggacccagcagaaggactgtccttcgctccttcattgtctacgtggacagtggatgaagctcagccgaacctgccttgttcccgttttctgggtcagcagggaaagcctttcacagagtagccaccgtgccatcctgaggaaggccctgggtcagaagcttctgtgcttctttgtaccccgggcaagacacacaggtgctcacactgctctgtagaaactgttggcatccaagagagactcacctggaaatctctggaaaacctgaagctcctagctgggggtgctgtgcttcagatgctggtggtgggtgggcacccttgcatcaacagctgcacagtgtgtggtgggcttgcagggtcgcttggcaatagtaggagctctgatttatttttttaaactttttttctggctgggcaggtggctcacacctgtaatcccagcactttggaaggcctaggcgggcggatcacttgaggtcaggagtttgagaccagccaggccaacatggtgaaaccccatctctactaaaaatacaaaaattagccaagcgtggtggcacacacctgtaattccagctacttgggaggcagaggcacaagaattgcttgaacctgggaggcagaggttgcagtgagccaagattatgccactgcactccagcctggatgacagagcgagactctgtctcaaaaaaaatagacaaagccaggcgcagtggctcatgcctgtaatcccaacactttgggaggccgaggtgggtgaatcacgaggtcaggagatcgagaccatcctggctaacacggtgaaaccccgtctctactgaaaatacaaaaaaattagccaggcgtggtggtgggcacctgtagtctcagctactcgggaggctgaggcaggagagtggcgtgaacccaggaggcggagcttgcagtgagctgagatcacgccactgcactccagcctgggcgacagagcgagactccgtctcaaaaaaaaaaaaaaaatagacctttttgtgttttctgttctactacacaagtaatacaggttgagtattccttaacctaaatgcctgggaccagaagtgtttcggatttcaggttttcgaatatttgcatgttcataatataatgagaccttgggaatgagccccaagtgtaaacacaaaatccatttatgttttatagacatcttaggcacatagcctgagagtaattttatgtatttagtaatttgggcgtgagccacagtttttgactgtgacctgtcccatgaggtcaggtgtggaattttccacttgtggtgggcgctcaaaaagtttcagattttggagcctttcaggttagagacatgcaatctataataagtttaatctaggaaaagttagggtctggcacagaggctcacgtctgtgatcccagcactttgggaggctgaggcaggcagatcactggaagtgctggacgggtggggaagtgccgggtgcaagaaccaagctctttgactatggacctcagcctgaggttggtcaagaggtggagtgagtgggggctgaggaccttcatcctgaaaccctgatgcaggagagtctggggtctgccttctaccctcatgtggcgggtgaaggagcaaggttctcaactcaggagggttcttcccctctccattcccacccaggggacatctcacaacaactagaaacaattttgtcgcagctggggggtgggaggtgtgttcctggcatctatctaatgggtgggggcgagggacgcagcccaacaccctacagtgcacaggacacagcgagatccggcctcaaactggcagccatggcagcgtcagccctccagggggcgcgccctggcgcaggtggtgtgccggcccacagctccttgcaggctgggagctgcattttcgtgacatgtcatgagtcctcagagaaaaagagggaacgagtgcatggtggggaggggccctggcgtgctggagtctctgggtttccttctccagagacccctgcagtcagctgagcgcaatcagtcacgttgggctttgcttggatctcactggaatttttcgagccaccccttagtcctcaccttgctaagccctcacgtctcaataacctcaaacctcagtacctgggctgagaaagcctgagtggccctgggagagagaccctgcacccaaggacaaggacatccctgcttcacccaacccaaaggccagtctggacatatgaactcaaccagctaagagtgatatgattgattgatgagaatcaccagagcacttgccagagtttcagcttctccctgggccaaagtgaagtttgctttacacagtaaatgtgctctgtgcaggtcctgaatttagaaggctgtgctgtgtcatcctgctctgtaaatggccagtaggacccccgccccttctcaaggcacattacccgtttaaaacgggggaggcaagagcacaaagcgcccacctattcaccgaagagcatgtatataacttagggccttccatccttaaacaacaggaccttccttgctcttacggaaaaggaaacaggttcagagacgttaattcattgccaaggtcacacagataatgggtccagcgaagagtggtgtccgagcccaaggcagcaggcctttggccactgcagtgttaaacagcacagctggtgtggaagtccggtgctgagtcctgggtacctggactcggagggaagctggctgcagggggaaggggctgcgcagttgtggatgtacctgtcgtctgctggggggcgtgcgggtggacacagtcccccggcctggggagcctcgtgggagaattaagagttactccgggccaaatggccggagttgtcagatctggcagcgtcttcgctggggctccagggagctgctgctggggtggaagctctcacactctttctccacgtgccctttccagttccctgacatcatggagttctgcgaggccatggccaacgccgggaagaccgtaattgtggctgcactggatgggaccttccagaggaaggtaaggcgtctgatccaggtctggagctgggattgaggagggcaagaggcttctggatgggcacagagacaccagctctgggtgaccagggctcagccaccacagggttacggccgagctgctcaggcttggctgagccaagggactccatggtctgtgcagactgcgtgccatctgttgtggcaggtgctttgaattggcaaagggacagagccgggcatggtgctctgggggttgggggaaggactaaggtcagagcaaactctcctggcttcagtacttgtgaatcagagggtttaaaagaaaaacccacctggtaaggtgctgagcgccctctgtctttccatgggagcacagccatttggggccatcctgaacctggtgccgctggccgagagcgtggtgaagctgacggcggtgtgcatggagtgcttccgggaagccgcctataccaagaggctcggcacagagaaggaggtagctccacctgccttccctgcaggccggcggggtgggggtatggctctgcctccttcctgtcctggcccttcacccatcccctgtccctgcggccaggtcgaggtgattgggggagcagacaagtaccactccgtgtgtcggctctgctacttcaagaaggcctcaggccagcctgccgggccggacaacaaagagaactgcccagtgccaggaaagccaggggaagccgtggctgccaggaagctctttgccccacagcagattctgcaatgcagccctgccaactgagggacctgcaagggccgcccgctcccttcctgccactgccgcctactggacgctgccctgcatgctgcccagccactccaggaggaagtcgggaggcgtggagggtgaccacaccttggccttctgggaactctcctttgtgtggctgccccacctgccgcatgctccctcctctcctacccactggtctgcttaaagcttccctctcagctgctgggacgatcgcccaggctggagctggccccgcttggtggcctgggatctggcacactccctctccttggggtgagggacagagccccacgctgttgacatcagcctgcttcttcccctctgcggctttcactgctgagtttctgttctccctgggaagcctgtgccagcacctttgagccttggcccacactgaggcttaggcctctctgcctgggatgggctcccaccctcccctgaggatggcctggattcacgccctcttgtttccttttgggctcaaagcccttcctacctctggtgatggtttccacaggaacaacagcatctttcaccaagatgggtggcaccaaccttgctgggacttggatcccaggggcttatctcttcaagtgtggagagggcagggtccacgcctctgctgtagcttatgaaattaactaattgaaaattcactggttggtggacgcacatttctctttcacctgggtttccctgggtctcatggacagctccaacttgatttggg

SEQ ID NO: 681 - DNA, 2607 bp, Homo sapiens
attaaacctctcgccgagcccctccgcagactctgcgccggaaagtttcatttgctgtatgccatcctcgagagctgtctaggttaacgttcgcactctgtgtatataacctcgacagtcttggcacctaacgtgctgtgcgtagctgctcctttggttgaatccccaggcccttgttggggcacaaggtggcaggatgtctcagtggtacgaacttcagcagcttgactcaaaattcctggagcaggttcaccagctttatgatgacagttttcccatggaaatcagacagtacctggcacagtggttagaaaagcaagactgggagcacgctgccaatgatgtttcatttgccaccatccgttttcatgacctcctgtcacagctggatgatcaatatagtcgcttttctttggagaataacttcttgctacagcataacataaggaaaagcaagcgtaatcttcaggataattttcaggaagacccaatccagatgtctatgatcatttacagctgtctgaaggaagaaaggaaaattctggaaaacgcccagagatttaatcaggctcagtcggggaatattcagagcacagtgatgttagacaaacagaaagagcttgacagtaaagtcagaaatgtgaaggacaaggttatgtgtatagagcatgaaatcaagagcctggaagatttacaagatgaatatgacttcaaatgcaaaaccttgcagaacagagaacacgagaccaatggtgtggcaaagagtgatcagaaacaagaacagctgttactcaagaagatgtatttaatgcttgacaataagagaaaggaagtagttcacaaaataatagagttgctgaatgtcactgaacttacccagaatgccctgattaatgatgaactagtggagtggaagcggagacagcagagcgcctgtattggggggccgcccaatgcttgcttggatcagctgcagaactggttcactatagttgcggagagtctgcagcaagttcggcagcagcttaaaaagttggaggaattggaacagaaatacacctacgaacatgaccctatcacaaaaaacaaacaagtgttatgggaccgcaccttcagtcttttccagcagctcattcagagctcgtttgtggtggaaagacagccctgcatgccaacgcaccctcagaggccgctggtcttgaagacaggggtccagttcactgtgaagttgagactgttggtgaaattgcaagagctgaattataatttgaaagtcaaagtcttatttgataaagatgtgaatgagagaaatacagtaaaaggatttaggaagttcaacattttgggcacgcacacaaaagtgatgaacatggaggagtccaccaatggcagtctggcggctgaatttcggcacctgcaattgaaagaacagaaaaatgctggcaccagaacgaatgagggtcctctcatcgttactgaagagcttcactcccttagttttgaaacccaattgtgccagcctggtttggtaattgacctcgagacgacctctctgcccgttgtggtgatctccaacgtcagccagctcccgagcggttgggcctccatcctttggtacaacatgctggtggcggaacccaggaatctgtccttcttcctgactccaccatgtgcacgatgggctcagctttcagaagtgctgagttggcagttttcttctgtcaccaaaagaggtctcaatgtggaccagctgaacatgttgggagagaagcttcttggtcctaacgccagccccgatggtctcattccgtggacgaggttttgtaaggaaaatataaatgataaaaattttcccttctggctttggattgaaagcatcctagaactcattaaaaaacacctgctccctctctggaatgatgggtgcatcatgggcttcatcagcaaggagcgagagcgtgccctgttgaaggaccagcagccggggaccttcctgctgcggttcagtgagagctcccgggaaggggccatcacattcacatgggtggagcggtcccagaacggaggcgaacctgacttccatgcggttgaaccctacacgaagaaagaactttctgctgttactttccctgacatcattcgcaattacaaagtcatggctgctgagaatattcctgagaatcccctgaagtatctgtatccaaatattgacaaagaccatgcctttggaaagtattactccaggccaaaggaagcaccagagccaatggaacttgatggccctaaaggaactggatatatcaagactgagttgatttctgtgtctgaagtgtaagtgaacacagaagagtgacatgtttacaaacctcaagccagccttgctcctggctggggcctgttgaagatgcttgtattttacttttccattgtaattgctatcgccatcacagctgaacttgttgagatccccgtgttactgcctatcagcattttactactttaaaaaaaaaaaaaaaagccaaaaaccaaatttgtatttaaggtatataaattttcccaaaactgataccctttgaaaaagtataaataaaatgagcaaaagttgaa

SEQ ID NO: 682 - DNA, 1574 bp, Homo sapiens
gcttctctccatcttgtgattcctttttcctcctgaaccctccagtgggggtgcgagtttgtctttatcaccccccatcccaccgccttcttttcttctcgctctcctacccctccccagcttggtgggcgcctctttcctttctcgccccctttcatttttatttattcatatttatttggcgcccgctctctctctgtccctttgcctgcctccctccctccggatccccgctctctccccggagtggcgcgtcgggggctccgccgctggccaggcgtgatgttgcacgtggagatgttgacgctggtgtttctggtgctctggatgtgtgtgttcagccaggacccgggctccaaggccgtcgccgaccgctacgctgtctactggaacagcagcaaccccagattccagaggggtgactaccatattgatgtctgtatcaatgactacctggatgttttctgccctcactatgaggactccgtcccagaagataagactgagcgctatgtcctctacatggtgaactttgatggctacagtgcctgcgaccacacttccaaagggttcaagagatgggaatgtaaccggcctcactctccaaatggaccgctgaagttctctgaaaaattccagctcttcactcccttttctctaggatttgaattcaggccaggccgagaatatttctacatctcctctgcaatcccagataatggaagaaggtcctgtctaaagctcaaagtctttgtgagaccaacaaatagctgtatgaaaactataggtgttcatgatcgtgttttcgatgttaacgacaaagtagaaaattcattagaaccagcagatgacaccgtacatgagtcagccgagccatcccgcggcgagaacgcggcacaaacaccaaggatacccagccgccttttggcaatcctactgttcctcctggcgatgcttttgacattatagcacagtctcctcccatcacttgtcacagaaaacatcagggtcttggaacaccagagatccacctaactgctcatcctaagaagggacttgttattgggttttggcagatgtcagatttttgttttctttctttcagcctgaattctaagcaacaacttcaggttgggggcctaaacttgttcctgcctccctcaccccaccccgccccacccccagccctggcccttggcttctctcacccctcccaaattaaatggactccagatgaaaatgccaaattgtcatagtgacaccagtggttcgtcagctcctgtgcattctcctctaagaactcacctccgttagcgcactgtgtcagcgggctatggacaaggaagaatagtggcagatgcagccagcgctggctagggctgggagggttttgctctcctatgcaatatttatgccttctcattcagaactgtaagatgatcgcgcagggcatcatgtcaccatgtcaggtccggaggggaggtattaagaatagatacgatattacaccatttcctataggagtatgtaaatgaacaggcttctaaaaggttgagacactggttttttttttt

SEQ ID NO: 683 - DNA, 1630 bp, Homo sapiens
acgaggcctcgtgccactgctgagcaagaatggaggccccactggtgagtctggatgaagagtttgaggaccttcgaccctcctgctcggaggacccggaggagaagccccagtgtttctatggttcatctccccaccatctcgaggacccctccctctccgagcttgagaatttttcttccgaaataatcagcttcaagtccatggaggacctcgtaaatgaatttgatgagaagctcaatgtctgctttcggaactacaacgccaagaccgagaacctagctcccgtgaagaaccagttacagatccaagaggaggaggagacccttcaggacgaggagtaagaagtcttaattgccctctcctgcttcagtcgagagccctgtagtccttgtctccttgacatagtgctggtttctgtctataggtttatgggctattactttcattttcgtgttgccagcggagcagtgccctggtacttgctgtcatagctctatatatgtccctttacagtcccctgaggagaactttcttaaattgaaaccttagaggaatgaaggttttcctagatacaaaatggaatttcaggagcacagtaaatttcagggtctgtctatcttaagctttctttatatcagtggaaatccagcgagatattagaaataaaggccagaaaaaattaattaaccatgatggatgaatctatgttattggactaatttgcttcaagaaacaccagaattttgaaaatcccgaatttttgacagcccctcaggcctggagagttatctacagatgttaggatatgtccacataagaaagcatctaaactgaactgagagcacagcgggctaccctggacaaagtaaaggtggaaactaggtgatgtggcctttgagtatgcagattcctggtatcacttgctcgctactttctagggtcttaatagtagtcaagaaaagggatctgagaaaagtactctttcaggagggactagaaagagaagggggtgatatgttacacaaattaaagaaggatgtcttaggcatttagtaaaaattcagtggttccccgctatcctcgggggatgtgtttttttgttttgttttgttttgtttttttttgagatgaagtttcattctatcgcccaggctggagtgcaatggcacaattttggctcactgcaacctccacctcccaggttcaagctattctcctgcctcagcctcctgagtagctgggactacaggtgtgcgccaccatgcccgactaatttttgtattttgagtagagatgggagtttcaccatgttggccaggctggtctcgaactcctgacctggtgatttgcccgccttggcctcccaaagtgctgggattacaggcgtgagtcaccacacctggcccatggtgggggatatgttttaagacccccagttaatgcctgaaaccgctgctagtaccaaaccctaatgttttttcctgtatgtacgtacatatgataaagttcagtttataagttaggcacagtaagagactaacaacagctcacagccaaatagagcaattataacaatatattgtaataaaaattatgtggatgtgaaaaaaaaaaaaaaaaaaaaaaa

SEQ ID NO: 684 - DNA, 1970 bp, Homo sapiens
atattggagtagcaagaggctgggaagccatcacttaccttgcactgagaaagaagacaaaggccagtatgcacagctttcctccactgctgctgctgctgttctggggtgtggtgtctcacagcttcccagcgactctagaaacacaagagcaagatgtggacttagtccagaaatacctggaaaaatactacaacctgaagaatgatgggaggcaagttgaaaagcggagaaatagtggcccagtggttgaaaaattgaagcaaatgcaggaattctttgggctgaaagtgactgggaaaccagatgctgaaaccctgaaggtgatgaagcagcccagatgtggagtgcctgatgtggctcagtttgtcctcactgaggggaaccctcgctgggagcaaacacatctgacctacaggattgaaaattacacgccagatttgccaagagcagatgtggaccatgccattgagaaagccttccaactctggagtaatgtcacacctctgacattcaccaaggtctctgagggtcaagcagacatcatgatatcttttgtcaggggagatcatcgggacaactctccttttgatggacctggaggaaatcttgctcatgcttttcaaccaggcccaggtattggaggggatgctcattttgatgaagatgaaaggtggaccaacaatttcagagagtacaacttacatcgtgttgcggctcatgaactcggccattctcttggactctcccattctactgatatcggggctttgatgtaccctagctacaccttcagtggtgatgttcagctagctcaggatgacattgatggcatccaagccatatatggacgttcccaaaatcctgtccagcccatcggcccacaaaccccaaaagcatgtgacagtaagctaacctttgatgctataactacgattcggggagaagtgatgttctttaaagacagattctacatgcgcacaaatcccttctacccggaagttgagctcaatttcatttctgttttctggccacaactgccaaatgggcttgaagctgcttacgaatttgccgacagagatgaagtccggtttttcaaagggaataagtactgggctgttcagggacagaatgtgctacacggataccccaaggacatctacagctcctttggcttccctagaactgtgaagcatatcgatgctgctctttctgaggaaaacactggaaaaacctacttctttgttgctaacaaatactggaggtatgatgaatataaacgatctatggatccaggttatcccaaaatgatagcacatgactttcctggaattggccacaaagttgatgcagttttcatgaaagatggatttttctatttctttcatggaacaagacaatacaaatttgatcctaaaacgaagagaattttgactctccagaaagctaatagctggttcaactgcaggaaaaattgaacattactaatttgaatggaaaacacatggtgtgagtccaaagaaggtgttttcctgaagaactgtctattttctcagtcatttttaacctctagagtcactgatacacagaatataatcttatttatacctcagtttgcatatttttttactatttagaatgtagccctttttgtactgatataatttagttccacaaatggtgggtacaaaaagtcaagtttgtggcttatggattcatataggccagagttgcaaagatcttttccagagtatgcaactctgacgttgatcccagagagcagcttcagtgacaaacatatcctttcaagacagaaagagacaggagacatgagtctttgccggaggaaaagcagctcaagaacacatgtgcagtcactggtgtcaccctggataggcaagggataactcttctaacacaaaataagtgttttatgtttggaataaagtcaaccttgtttctactgtttt

SEQ ID NO: 685 - DNA, 650 bp, Homo sapiens
gccctggacaccaactattgcttcagctccacggagaagaactgctgcgtgcggcagctgtacattgacttccgcaaggacctcggctggaagtggatccacgagcccaagggctaccatgccaacttctgcctcgggccctgcccctacatttggagcctggacacgcagtacagcaaggtcctggccctgtacaaccagcataacccgggcgcctcggcggcgccgtgctgcgtgccgcaggcgctggagccgctgcccatcgtgtactacgtgggccgcaagcccaaggtggagcagctgtccaacatgatcgtgcgctcctgcaagtgcagctgaggtcccgccccgccccgccccgccccggcaggcccggccccaccccgccccgcccccgctgccttgcccatgggggctgtatttaaggacaccgtgccccaagcccacctggggccccattaaagatggagagaggactgcggatctctgtgtcattgggcgcctgcctggggtctccatccctgacgttcccccactcccactccctctctctccctctctgcctcctcctgcctgtctgcactattcctttgcccggcatcaaggcacaggggaccagtggggaacactactgtagttagatccccggg

SEQ ID NO: 686 - DNA, 4750 bp, Homo sapiens
gttgcttcttcctccagaagtgggcgctgggcagtcacgcagggtttgaaccggaagcgggagtaggtagctgcgtggctaacggagaaaagaagccgtggccacgggaggaggcgagaggagtcgggatctgcgctgcagccaccgccgcggttgatactactttgaccttccgagtgcagtggtaggggcgcggaggcaacgcagcggcttctgcgctgggaaattcagtcgtgtgcgacccagtctgtcctctccccagaccgccaatctcatgcacccctccagagtggcccttgactcctccctctcctcactccatctttcctggcctctctccgggtgcttagcggacttggccaataacctcctccttttaaacgccctgaattgaaccctgcctcctgcgcatcctctttttgtgtcaccttagggttcagatttaactacgcgacttgactagtcatcttttgatctctctctcgtatttagtacttttagtcagcgagcatttattgatatttcaacttcagcctcgcggttaagagcttgggctctggaatcatacggctggaattggaattctgtcagtcgtgtggccgctctctactgtcttgtgaagataagtgagataatcttgacctgtggtgagcactcgtgagcgttagctgctgtatttaccaggtacagataagacaactacagtggatgataatgtatgtggtgataggggagtactctgatggtagaggagtgactttggttctctgcaaactcagcctgagactatcaattcagtttgtggtgagacctcgcagtgttaccttggcagatggtagaagccttccagatggaaggaaaaatgcgtgtaaaggcacaaagtgtagaaggaccctgaagctccagcgtgaggcctggcattgaatgaaatatattttgtgggttttcagctgctgaagtcataggaatggatgagaccaagaaaacaaagctgtttttgaggtatgagcggaagaagagatatcaggagactttcgaaacagtcataacggaagttaatatgatcattgctaacatttgctgtgtttcaggcactgtaagcatgtatatgggtccttaaagggactcatagaggtaggtactagtattgtttttccttttatcattgagaaactgaggtttgaagagattagtgaacttgctctagattatacagtttgtaagtggctgaaccaggatttgaactaatacaatctgactacagaggccacactccttagcactagaaaagaatggcatgccaagggcagagttatttctaggaagatgggatataagcgtcattgtcaagttgtgcaaaggggtcaacttggttgagatctaaaaaggaacactgaattcgtcaattcagaggctcgtaggaagtaggaaatccttatcttttcgtttgaaccttgagtggaacctagatattctggattaatgtataagtgaagttcatctttatatggtgacactcatactctagttgactacctaatagttcctctgccttctttcagttccgccaacatactgtgttctttaacattgtagaaccctttggctatgctagtctccttccctgaagtgttggtcctctagccctttttttgattggcaccagttagttcagatcttggctttattataaactcctctgagatatatgttccctgacagtttatctaaaatgattctctctacagttattttctattactgtgtttttgtttcctcagaggcatacatcacaatttggaattatgcattggtttatcaatttacttgtttattgtcaccctgctgcccagatatgacttcatgagggtaggatttgtatctgtttagttcattatttgtctagctataagtagtaaatattgtttgcatctatcagtgaatgagcatcttctgtttatgtagataatactgaactgttttgttttcttcaaagtaatcattaagctgaaggtaagaaaaacaagttcaaggaagtcacaccatggggaaaaaaaagtcaagtttagggctgcctcttccgggaagtgtcaaatctttagtatatttaggaataaaggtgccaaaccttatggttctttggatattgctaaggtattttcattggttagattaccagtttcattttccttattgactcaagagggctttaaactgagattgaagaagtaagaagattcctagataaaaccataaggaatggaaaaacaaaaatgataatacttgtccacaggaagtatataatcaaatgaaaagaactcaaataacaatctgtaatctatagcagagtaaagcggaagttgtaatagtgttgggggatgggggaagtcagaagaaccaccagtgaatatgaaaggagaagagaatcagagccatctgctaataaaatgggtagtcagctctttttgttttttttgtcttgttttgttttgagacagtctcgctctgtcgcccatgctggagtgcaattgcgtgatctcagctaactgcactttccgcctcctgggttcaagtgagtctcctacctcagtctccccagtagctaggattgcaggcacatgctaccacacctggttaatttttgtatttttagtagagacggggtttcacgatgttggccaggctggctggtctcgaactcctgacctcgtggaacgcccacctcggcctcccagagtgctgggattacaggcatgagccaccacgcctagccccggtagtcagctcttactgagaatattcaaagacagggcattcattttgtaagagacattccttccttcataggaagattggacctggtcttttagttcctcccaattttgagattctgtgagattgaatcggggcagagaaacatacttaatcttgaaagattaagtagaatttagatggatggataggagaaggactttccctacctttttacttcttgagatatagttatttgtaggtataatatacataaatatatgtattttttctctgtttacagacattcatagtttaataaaaaacttctttgtattatataaaggtttagatcagaactagtaaaacagaatgctgtttctttttttttcttttctattttactttaggttctgtgggtagatgtgcgggtttgttacatgggtaaattgcatgttgctgaggcttggtgtacgaatgatcctgtcactcaggtagtgagcatagtacctgataggtagcccttcaagccatacctccctttctttccaaccctcaaacagtccccagtctctgttcttcccatctttgtgtccatgttgaaatgctgttcttactacatttttttgaaggacatcaaaagagagtttgattatatcagaagcccccaaaagaagagagctactcagtggaatcaaggcatagtaaaatatagttgatccttgatatttgcaaaggataccaccatagcatagaatttgcttcatttccttttaaaacagaaatgtcattttactcctattgttatgtgttaaataagaaccttaataccagttgagatggaagtggtaggcaaagcttactagctctgataacctcctacttatcagctccaaagcatgttttaagcctttggctcagcaaaatgacatgtctctccatataagcaagagtgcttttttttttttctttgagacggagtcttgctctgtcaccaggctggagtgcagtggcgcgatctccgctcactgcaacctctgcctcctgggttcaagcgattctcctacctcagcctcctgagtagctgggactacaagagcacactaccacgcctggccaagagtgcttttaaatagttcattgtcaatgttaaatccttgagtgctcatttccttatttacctggctgttttctattcatctttcatgtctcaatttaaatgtcatgtttctttggtctcagagtaataaaaagtaaatatacttcccccatctcccgccccgcagagccttcctctgttgcccaggctggagtacagtggctcgatcttggctcactgaaagctctgcctcccagattcaagcgattctcctgcctcagcctcctgagtagctgggattacaggcgcgcgccaccaagcccggctaatttttgtatttttagtagagacagggtttcaccatgttggtcaggctggtcgaactcctgaccttgtgatcctcccaccttggcctcccaaagtgctgggattacaggcgtgagccactgcgtccagtgtaaattatacttttattttaatcctgctactactgcaagcaaggcaaacatttttgtgttacagcattacttgtatagattttaagaaaatctcattttaaatacggaaatgttaagaaaaattattgtgcctttgaccagaatgtgcctctaattgtacagttaaatctaactataaatactgcagtataaaataattatatacacattttttcacacctctttctctctatatatgcatatatacatatacatatatatacctatatgtattttttttacagacagtgatgtgtgttctgaaattgtgaaccatgagtctagtacttaatgatctgcttatctgctgccgtcaactagaacatgatagagctacagaacgaaaggtagtaaattacttaaattcaatttttccttgaaatgtgtgattagtaacccatta

SEQ ID NO: 687 - DNA, 2073 bp, Homo sapiens; identical to SEQ ID NO: 219

SEQ ID NO: 688 - DNA, 465 bp, Homo sapiens; identical to SEQ ID NO: 4
  misc_feature (1)...(465): n=a,t,g or c

SEQ ID NO: 689 - DNA, 40046 bp, Homo sapiens; identical to SEQ ID NO: 7

SEQ ID NO: 690 - DNA, 1795 bp, Homo sapiens; identical to SEQ ID NO: 229

SEQ ID NO: 691 - DNA, 38374 bp, Homo sapiens; identical to SEQ ID NO: 230

SEQ ID NO: 692 - DNA, 1549 bp, Homo sapiens; identical to SEQ ID NO: 234

SEQ ID NO: 693 - DNA, 2148 bp, Homo sapiens; identical to SEQ ID NO: 10

SEQ ID NO: 694 - DNA, 339 bp, Homo sapiens; identical to SEQ ID NO: 243

SEQ ID NO: 695 - DNA, 379 bp, Homo sapiens; identical to SEQ ID NO: 248

SEQ ID NO: 696 - DNA, 367 bp, Homo sapiens; identical to SEQ ID NO: 259
  misc_feature (1)...(367): n=a,t,g or c

SEQ ID NO: 697 - DNA, 409 bp, Homo sapiens; identical to SEQ ID NO: 24
  misc_feature (1)...(409): n=a,t,g or c

SEQ ID NO: 698 - DNA, 434 bp, Homo sapiens; identical to SEQ ID NO: 264

SEQ ID NO: 699 - DNA, 512 bp, Homo sapiens; identical to SEQ ID NO: 36
  misc_feature (1)...(512): n=a,t,g or c

SEQ ID NO: 700 - DNA, 359 bp, Homo sapiens; identical to SEQ ID NO: 272

SEQ ID NO: 701 - DNA, 529 bp, Homo sapiens
  misc_feature (1)...(529): n=a,t,g or c
ttttttgactagaaagggagcactttaatgaacagaagtacagacgtgctggcaaggatggaaatctccactggttcctggcccccttcacctccatgcatccccagcatgggtgttaatcattacccaagctctcgctgttccccctcaccccctgcagagtccagcaggtctagatacgtgctctttgaaatgtgttctgggattaaaaatggtgccctgaggctgtctaaccctcacaaaagacagacacatgcacacacgggccttggggagggctgtgtattagcagtcaggtgggccctcctgggagagcttgctcaagaactcttctcggaaggaaacccaccttaaggtagggttctgataggcagantcccagagggacagccagctgctagaagatggggttatccagggtttgtaaggtttaaacaacgggcagggagncaaacgagtcaaatggtttcctcgtgcgaattttggctcgaggcaaattcctatagtgagngtattaaatcgtaacatg

SEQ ID NO: 702 - DNA, 262 bp, Homo sapiens; identical to SEQ ID NO: 46

SEQ ID NO: 703 - DNA, 435 bp, Homo sapiens; identical to SEQ ID NO: 47
  misc_feature (1)...(435): n=a,t,g or c

SEQ ID NO: 704 - DNA, 317 bp, Homo sapiens; identical to SEQ ID NO: 52
  misc_feature (1)...(317): n=a,t,g or c

SEQ ID NO: 705 - DNA, 414 bp, Homo sapiens; identical to SEQ ID NO: 53
  misc_feature (1)...(414): n=a,t,g or c

SEQ ID NO: 706 - DNA, 384 bp, Homo sapiens
  misc_feature (1)...(384): n=a,t,g or c
ctttattaaacatcattcactgagaatttccaaagcactgtgtggttgcctagacctgtgtaccagcgctctgggggtcgggagaagtctaaggcacgggccctgcctggcgcacggctccttctccctgggaaggcagctccactggtgaaaggccactgaccaagtccagaccctgaggacgacgaaggcctcggggcagaagcctgagagantcatgccccactggcagtgggaggcggtgcaggctgggagccctgcccagggccccaggttgagctntgggggaaagctatgacccagtttgctgagagctgcaatgacgaacattgggctctntgcccagaggcccaaggaagggccatgggacttgggctgggcctt

SEQ ID NO: 707 - DNA, 244 bp, Homo sapiens
  misc_feature (1)...(244): n=a,t,g or c
ntttttttttttttcaagtcaaaactgttttattgtcngtttacatatttaatagaaaaaggaatgtagcaaatgctcagggttgtatgaaaaaaaaatccaggtttgtgcaggttgctctgtttacatctgggagcagggctgtccccacatcaggcacagcagctgcacttctccgacgcccctttgcagacgcagccctgggacacttggcacagccatggnagaccaggagcagcagctc

SEQ ID NO: 708 - DNA, 329 bp, Homo sapiens; identical to SEQ ID NO: 62
  misc_feature (1)...(329): n=a,t,g or c

SEQ ID NO: 709 - DNA, 415 bp, Homo sapiens; identical to SEQ ID NO: 70
  misc_feature (1)...(415): n=a,t,g or c

SEQ ID NO: 710 - DNA, 231 bp, Homo sapiens; identical to SEQ ID NO: 73

SEQ ID NO: 711 - DNA, 390 bp, Homo sapiens; identical to SEQ ID NO: 78

SEQ ID NO: 712 - DNA, 465 bp, Homo sapiens; identical to SEQ ID NO: 79
  misc_feature (1)...(465): n=a,t,g or c

SEQ ID NO: 713 - DNA, 456 bp, Homo sapiens; identical to SEQ ID NO: 287

SEQ ID NO: 714 - DNA, 436 bp, Homo sapiens; identical to SEQ ID NO: 288

SEQ ID NO: 715 - DNA, 265 bp, Homo sapiens; identical to SEQ ID NO: 302

SEQ ID NO: 716 - DNA, 212 bp, Homo sapiens; identical to SEQ ID NO: 97

SEQ ID NO: 717 - DNA, 434 bp, Homo sapiens; identical to SEQ ID NO: 313

SEQ ID NO: 718 - DNA, 241 bp, Homo sapiens; identical to SEQ ID NO: 318

SEQ ID NO: 719 - DNA, 409 bp, Homo sapiens; identical to SEQ ID NO: 98
  misc_feature (1)...(409): n=a,t,g or c

SEQ ID NO: 720 - DNA, 357 bp, Homo sapiens
  misc_feature (1)...(357): n=a,t,g or c
ttaatataaaagtaaaagagtacattgttgagtagaggattaaaggagtgacgaccctttctaaagtggggtctcccatcccggatccctaagactgtaacatctgctacatacattaaaancaaaacaaaacaaaagcaaacatgaaacttatgacctgacttcactccacccttcatgcctgcattatgacagaaacacgtcccactgctcctacttatgtatgtacatccagaggctccaaacctaaggctgtgggccccctcctcccaggccccacacacacacacccctggcacacacatggcacacacatggcacacacatggcacacacacacatacctggctggcccat

SEQ ID NO: 721 - DNA, 307 bp, Homo sapiens; identical to SEQ ID NO: 99

SEQ ID NO: 722 - DNA, 257 bp, Homo sapiens; identical to SEQ ID NO: 325
  misc_feature (1)...(257): n=a,t,g or c

SEQ ID NO: 723 - DNA, 437 bp, Homo sapiens; identical to SEQ ID NO: 100

SEQ ID NO: 724 - DNA, 509 bp, Homo sapiens; identical to SEQ ID NO: 104

SEQ ID NO: 725 - DNA, 387 bp, Homo sapiens; identical to SEQ ID NO: 338

SEQ ID NO: 726 - DNA, 432 bp, Homo sapiens; identical to SEQ ID NO: 341
  misc_feature (1)...(432): n=a,t,g or c

SEQ ID NO: 727 - DNA, 346 bp, Homo sapiens; identical to SEQ ID NO: 107
  misc_feature (1)...(346): n=a,t,g or c

SEQ ID NO: 728 - DNA, 453 bp, Homo sapiens; identical to SEQ ID NO: 347
  misc_feature (1)...(453): n=a,t,g or c

SEQ ID NO: 729 - DNA, 5654 bp, Homo sapiens; identical to SEQ ID NO: 349

SEQ ID NO: 730 - DNA, 55795 bp, Homo sapiens; identical to SEQ ID NO: 109
  misc_feature (1)...(55795): n=a,t,g or c

SEQ ID NO: 731 - DNA, 2226 bp, Homo sapiens; identical to SEQ ID NO: 111

SEQ ID NO: 732 - DNA, 4565 bp, Homo sapiens; identical to SEQ ID NO: 112

SEQ ID NO: 733 - DNA, 419 bp, Homo sapiens; identical to SEQ ID NO: 361

SEQ ID NO: 734 - DNA, 5508 bp, Homo sapiens
gattttaggtgatgggcaagtcagaaagtcagatggatataactgatatcaacactccaaagccaaagaagaaacagcgatggactcgactggagatcagcctctcggtccttgtcctgctcctcaccatcatagctgtgagaatgatcgcactctatgcaacctacgatgatggtatttgcaagtcatcagactgcataaaatcagctgctcgactgatccaaaacatggatgccaccactgagccttgtagagactttttcaaatatgcttgcggaggctggttgaaacgtaatgtcattcccgagaccagctcccgttacggcaactttgacattttaagagatgaactagaagtcgttttgaaagatgtccttcaagaacccaaaactgaagatatagtagcagtgcagaaagcaaaagcattgtacaggtcttgtataaatgaatctgctattgatagcagaggtggagaacctctactcaaactgttaccagacatatatgggtggccagtagcaacagaaaactgggagcaaaaatatggtgcttcttggacagctgaaaaagctattgcacaactgaattctaaatatgggaaaaaagtccttattaatttgtttgttggcactgatgataagaattctgtgaatcatgtaattcatattgaccaacctcgacttggcctcccttctagagattactatgaatgcactggaatctataaagaggcttgtacagcatatgtggattttatgatttctgtggccagattgattcgtcaggaagaaagattgcccatcgatgaaaaccagcttgctttggaaatgaataaagttatggaattggaaaaagaaattgccaatgctacggctaaacctgaagatcgaaatgatccaatgcttctgtataacaagatgagattggcccagatccaaaataacttttcactagagatcaatgggaagccattcagctggttgaatttcacaaatgaaatcatgtcaactgtgaatattagtattacaaatgaggaagatgtggttgtttatgctccagaatatttaaccaaacttaagcccattcttaccaaatattctgccagagatcttcaaaatttaatgtcctggagattcataatggatcttgtaagcagcctcagccgaacctacaaggagtccagaaatgctttccgcaaggccctttatggtacaacctcagaaacagcaacttggagacgttgtgcaaactatgtcaatgggaatatggaaaatgctgtggggaggctttatgtggaagcagcatttgctggagagagtaaacatgtggtcgaggatttgattgcacagatccgagaagtttttattcagactttagatgacctcacttggatggatgccgagacaaaaaagagagctgaagaaaaggccttagcaattaaagaaaggatcggctatcctgatgacattgtttcaaatgataacaaactgaataatgagtacctcgagttgaactacaaagaagatgaatacttcgagaacataattcaaaatttgaaattcagccaaagtaaacaactgaagaagctccgagaaaaggtggacaaagatgagtggataagtggagcagctgtagtcaatgcattttactcttcaggaagaaatcagatagtcttcccagccggcattctgcagccccccttctttagtgcccagcagtccaactcattgaactatgggggcatcggcatggtcataggacacgaaatcacccatggcttcgatgacaatggcagaaactttaacaaagatggagacctcgttgactggtggactcaacagtctgcaagtaactttaaggagcaatcccagtgcatggtgtatcagtatggaaacttttcctgggacctggcaggtggacagcaccttaatggaattaatacactgggagaaaacattgctgataatggaggtcttggtcaagcatacagagcctatcagaattatattaaaaagaatggcgaagaaaaattacttcctggacttgacctaaatcacaaacaactatttttcttgaactttgcacaggtgtggtgtggaacctataggccagagtatgcggttaactccattaaaacagatgtgcacagtccaggcaatttcaggattattgggactttgcagaactctgcagagttttcagaagcctttcactgccgcaagaattcatacatgaatccagaaaagaagtgccgggtttggtgatcttcaaaagaagcattgcagcccttggctagacttgccaacaccacagaaatggggaattctctaatcgaaagaaaatgggccctaggggtcactgtactgacttgagggtgattaacagagagggcaccatcacaatacagataacattaggttgtcctagaaagggtgtggagggaggaagggggtctaaggtctatcaagtcaatcatttctcactgtgtacataatgcttaatttctaaagataatattactgtttatttctgtttctcatatggtctaccagtttgctgatgtccctagaaaacaatgcaaaacctttgaggtagaccaggatttctaatcaaaagggaaaagaagatgttgaagaatagagttaggcaccagaagaagagtaggtgacactatagtttaaaacacattgcctaactactagtttttacttttatttgcaacatttacagtccttcaaaatccttccaaagaattcttatacacattggggccttggagcttacatagttttaaactcatttttgccatacatcagttattcattctgtgatcatttattttaagcactcttaaagcaaaaaatgaatgtctaaaattgttttttgttgtacctgctttgactgatgctgagattcttcaggcttcctgcaattttctaagcaatttcttgctctatctctcaaaacttggtatttttcagagatttatataaatgtaaaaataataatttttatatttaattattaactacatttatgagtaactattattataggtaatcaatgaatattgaagtttcagcttaaaataaacagttgtgaaccaagatctataaagcgatatacagatgaaaatttgagactatttaaacttataaatcatattgatgaaaagatttaagcacaaactttagggtaaaaattgcgattggacagttgtctagagatatatatacttgtggttttcaaattggactttcaaaattaaatctgtccctgagagtgtctctgataaaagggcaaatctgcacctatgtagctctgcatctcctgtcttttcaggtttgtcatcagatggaaatattttgataataaattgaaattgtgaactcattgctccctaagactgtgacaactgtctaactttagaagtgcatttctgaatagaaatgggaggcctctgatggaccttctagaattataagtcacaaagagttctggaaaagaactgtttactgcttgataggaattcatcttttgaggcttctgttcctctcttttcctgttgtattgactattttcgttcattacttgattaagattttacaaaagaggagcacttccaaaattcttatttttcctaacaaaagatgaaagcagggaatttctatctaaatgatgagtattagttccctgtctcttgaaaaatgcccatttgcctttaaaaaaaaaagttacagaaatactataacatatgtacataaattgcataaagcataagtatacagttcaataaacttaactttaactgaacaatggccctgtagccagcacctgtaagaaacagagcagtaccagcgctctaaaagcacctccttgtcactttattactcccagaacaacaactatcctgacttctaatatcattcactagctttgcctggttttgtcttttatgcagatagaatcaatcagtatgtattcttttgtgcctggcttctttctctcagccttacatttgtgagattcctctgtattgtgctgattgtggatcttttcattctcattgcagaataatgttctattgtgggacttattacaatttgttcatcctattgttgatgggcacttgagaactttccattttggcgctattacaaatagtgcaactatgaatgtactgcatgttaccatcttacttgagcctttaatggacttatttcttcaaatccttccaaaaattattataagcattgaaattatagtttcaagccaactgtggatacccttaccctttcctcctttatcacaaccaccgttacaagtatacttatatttccctaaaatacatttaaaacttacctaagtgacatttgtagttggagtaataggagcttccagctctaataaaacagctgtctctaacttattttatttccatcatgtcagagcaggtgaagagccagaagtgaagagtgactagtacaaattataaaaagccactagactcttcactgttagctttttaaaacattaggctcccatccctatggaggaacaactctccagtgcctggatcccctctgtctacaaatataagattttctgggcctaaaggatagatcaaagtcaaaaatagcaatgcctccctatccctcacacatccagacatcatgaattttacatggtactcttgttgagttctatagagccttctgatgtctctaaagcactaccgattctttggagttgtcacatcagataagacatatctctaattccatccataaatccagttctactatggctgagttctggtcaaagaaagaaagtttagaagctgagacacaaagggttgggagctgatgaaactcacaaatgatggtaggaagaagctctcgacaatacccgttggcaaggagtctgcctccatgctgcagtgttcgagtggattgtaggtgcaagatggaaaggattgtaggtgcaagctgtccagagaaaagagtccttgttccagccctattctgccactcctgacagggtgaccttgggtatttgcaatattcctttgggcctctgcttctctcacctaaaaaaagagaattagattatattggtggttctcagcaagagaaggagtatgtgtccaatgctgccttcccatgaatctgtctcccagttatgaatcagtgggcaggataaactgaaaactcccatttaagtgtctgaatcgagtgagacaaaattttagtccaaataacaagtaccaaagttttatcaagtttgggtctgtgctgctgttactgttaaccatttaagtggggcaaaaccttgctaattttctcaaaagcatttatcattcttgttgccacagctggagctctcaaactaaaagacatttgttattttggaaagaagaaagactctattctcaaagtttcctaatcagaaatttttatcagtttccagtctcaaaaatacaaaataaaaacaaacgtttttaatact

SEQ ID NO: 735 - DNA, 1855 bp, Homo sapiens; identical to SEQ ID NO: 368

SEQ ID NO: 736 - DNA, 4957 bp, Homo sapiens; identical to SEQ ID NO: 374

SEQ ID NO: 737 - DNA, 2482 bp, Homo sapiens; identical to SEQ ID NO: 117

SEQ ID NO: 738 - DNA, 4656 bp, Homo sapiens; identical to SEQ ID NO: 119

SEQ ID NO: 739 - DNA, 2353 bp, Homo sapiens; identical to SEQ ID NO: 120

SEQ ID NO: 740 - DNA, 2134 bp, Homo sapiens; identical to SEQ ID NO: 391

SEQ ID NO: 741 - DNA, 1435 bp, Homo sapiens; identical to SEQ ID NO: 400

SEQ ID NO: 742 - DNA, 2517 bp, Homo sapiens; identical to SEQ ID NO: 403

SEQ ID NO: 743 - DNA, 7720 bp, Homo sapiens; identical to SEQ ID NO: 125

SEQ ID NO: 744 - DNA, 2436 bp, Homo sapiens; identical to SEQ ID NO: 417

SEQ ID NO: 745 - DNA, 882 bp, Homo sapiens; identical to SEQ ID NO: 130

SEQ ID NO: 746 - DNA, 4211 bp, Homo sapiens; identical to SEQ ID NO: 135

SEQ ID NO: 747 - DNA, 4646 bp, Homo sapiens; identical to SEQ ID NO: 459

SEQ ID NO: 748 - DNA, 1763 bp, Homo sapiens; identical to SEQ ID NO: 138

SEQ ID NO: 749 - DNA, 3687 bp, Homo sapiens; identical to SEQ ID NO: 139

SEQ ID NO: 750 - DNA, 2422 bp, Homo sapiens
taaagtaacaacggtaataaagagttttcactctccaaatcacagggctcctaggtattttccctaaactaaccactgctttccaggatggcctgcctccttcgctcatttcagagaatttctgcaggggttttcttcttagctctttggggcatggttgtaggtgacaagctgctggtggtccctcaggacggaagccactggcttagtatgaaggatatagttgaggttctcagtgaccggggtcatgagattgtagtggtggtgcctgaagttaatttgcttttgaaagaatacaaatactacacaagaaaaatctatccagtgccgtatgaccaagaagagctgaagaaccgttaccaatcatttggaaacaatcactttgctgagcgatcattcctaactgctcctcagacagagtacaggaataacatgattgttattggcctgtacttcatcaactgccagagcctcctgcaggacagggacaccctgaacttctttaaggagagcaagtttgatgctcttttcacagacccagccttaccctgtggggtgatcctggctgagtatttgggcctaccatctgtgtacctcttcaggggttttccgtgttccctggagcatacattcagcagaagcccagaccctgtgtcctacattcccaggtgctacacaaagttttcagaccacatgactttttcccaacgagtggccaacttccttgttaatttgttggagccctatctattttattgtctgttttcaaagtatgagaaactcgcatcagctgtcctcaagagagatgtggatataatcaccttatcagaggtctctgtttggctgttaagatatgactttgtgcttgaatatcctaggccggtcatgcccaacatggtcttcattggaggtatcaactgtaagaagaggaaagacttgtctcaggaatttgaagcctacattaatgcttctggagaacatggaattgtggttttctctttgggatcaatggtctcagaaattccagagaagaaagctatggcaattgctgatgctttgggcaaaaaccctcagacagtcctgtggcggtacactggaacccgaccatcgaatcttgcgaacaacacgatacttgttaagtggctaccccaaaacgatctgcttggtcacccgatgacccgtgcctttatcacccatgctggttcccatggtgtttatgaaagcatatgcaatggcgttcccatggtgatgatgcccttgtttggtgatcagatggacaatgcaaagcgcatggagactaagggagctggagtgaccctgaatgttctggaaatgacttctgaagatttagaaaatgctctaaaagcagtcatcaatgacaaaagttacaaggagaacatcatgcgcctctccagccttcacaaggaccgcccggtggagccgctggacctggccgtgttctgggtggagtttgtgatgaggcacaagggcgcgccacacctgcgccccgcagcccacgacctcacctggtaccagtaccattccttggacgtgattggtttcctcttggccgtcgtgctgacagtggccttcatcacctttaaatgttgtccttatggctacccgaaatgcttggggaaaaaagggcgagttaagaaagcccacaaatccaagacccattgagaggtgggtgggaaataaggtaaaattttgaaccatccctagtcatttccaaacttgaaaacagaatcagtgttaaattcattttattcttattaaggaaatactttgcataaattaatcagccccagagtgtctttaaaaaattctcttaaataaaaataatagactcgctagtcagtaaagatatttgaatatgtatcgtgccccctccggagtctttgatcaggatgacatgtgccatttttcagaggacgtgcagacaggctggcattctagattacttttcttactctgaaacatggcctgtttgggagtgcgggattcaaaggtggtcccacggctgcccctactgcaaatggcagttttaatcttatcttttggcttctgcagatggttgcattgatccttaaccaataatggtcagtcctcatctctgtcctgacttcataggtgccaccttgtggtttaaagaagggaagctttgtacctttagagtgtaggtgaaatgaatgaatggcttggagtgcactgagaacagcatatgatttcttgctttggggaaaaagaatgatgctatgaaattggtgggtggtgtatttgagaagataatcattgcttatgtcaaatggagctgaatttgataaaaacccaaaatacagctatgaagtgctgggcaagtttacttttttttctgatgtttcctacaactaaaaataaattaataaatttatataattct

SEQ ID NO: 751 - DNA, 4139 bp, Homo sapiens
ccgctccacctctcaagcagccagcgcctgcctgaatctgttctgccccctccccacccatttcaccaccaccatgacaccgggcacccagtctcctttcttcctgctgctgctcctcacagtgcttacagttgttacaggttctggtcatgcaagctctaccccaggtggagaaaaggagacttcggctacccagagaagttcagtgcccagctctactgagaagaatgctgtgagtatgaccagcagcgtactctccagccacagccccggttcaggctcctccaccactcagggacaggatgtcactctggccccggccacggaaccagcttcaggttcagctgccacctggggacaggatgtcacctcggtcccagtcaccaggccagccctgggctccaccaccccgccagcccacgatgtcacctcagccccggacaacaagccagccccgggctccaccgcccccccagcccacggtgtcacctcggccccggacaccaggccggccccgggctccaccgcccccccagcccacggtgtcacctcggccccggacaccaggccggccccgggctccaccgcccccccagcccacggtgtcacctcggccccggacaccaggccggccccgggctccaccgcccccccagcccacggtgtcacctcggccccggacaccaggccggccccgggctccaccgcccccccagcccacggtgtcacctcggccccggacaccaggccggccccgggctccaccgcccccccagcccacggtgtcacctcggccccggacaccaggccggccccgggctccaccgcccccccagcccacggtgtcacctcggccccggacaccaggccggccccgggctccaccgcccccccagcccacggtgtcacctcggccccggacaccaggccggccccgggctccaccgcccccccagcccacggtgtcacctcggccccggacaccaggccggccccgggctccaccgcccccccagcccacggtgtcacctcggccccggacaccaggccggccccgggctccaccgcccccccagcccacggtgtcacctcggccccggacaccaggccggccccgggctccaccgcccccccagcccacggtgtcacctcggccccggacaccaggccggccccgggctccaccgcccccccagcccacggtgtcacctcggccccggacaccaggccggccccgggctccaccgcccccccagcccacggtgtcacctcggccccggacaccaggccggccccgggctccaccgcccccccagcccacggtgtcacctcggccccggacaccaggccggccccgggctccaccgcccccccagcccacggtgtcacctcggccccggacaccaggccggccccgggctccaccgcccccccagcccacggtgtcacctcggccccggacaccaggccggccccgggctccaccgcccccccagcccacggtgtcacctcggccccggacaccaggccggccccgggctccaccgcccccccagcccacggtgtcacctcggccccggacaccaggccggccccgggctccaccgcccccccagcccacggtgtcacctcggccccggacaccaggccggccccgggctccaccgcccccccagcccacggtgtcacctcggccccggacaccaggccggccccgggctccaccgcccccccagcccacggtgtcacctcggccccggacaccaggccggccccgggctccaccgcccccccagcccacggtgtcacctcggccccggacaccaggccggccccgggctccaccgcccccccagcccacggtgtcacctcggccccggacaccaggccggccccgggctccaccgcccccccagcccacggtgtcacctcggccccggacaccaggccggccccgggctccaccgcccccccagcccacggtgtcacctcggccccggacaccaggccggccccgggctccaccgcccccccagcccacggtgtcacctcggccccggacaccaggccggccccgggctccaccgcccccccagcccacggtgtcacctcggccccggacaccaggccggccccgggctccaccgcccccccagcccacggtgtcacctcggccccggacaccaggccggccccgggctccaccgcccccccagcccacggtgtcacctcggccccggacaccaggccggccccgggctccaccgcccccccagcccacggtgtcacctcggccccggacaccaggccggccccgggctccaccgcccccccagcccacggtgtcacctcggccccggacaccaggccggccccgggctccaccgcccccccagcccacggtgtcacctcggccccggacaccaggccggccccgggctccaccgcccccccagcccacggtgtcacctcggccccggacaccaggccggccccgggctccaccgcccccccagcccacggtgtcacctcggccccggacaccaggccggccccgggctccaccgcccccccagcccacggtgtcacctcggccccggacaccaggccggccccgggctccaccgcccccccagcccacggtgtcacctcggccccggacaccaggccggccccgggctccaccgcccccccagcccacggtgtcacctcggccccggacaccaggccggccccgggctccaccgcccccccagcccacggtgtcacctcggccccggacaccaggccggccccgggctccaccgcccccccagcccacggtgtcacctcggccccggacaccaggccggccccgggctccaccgcccccccagcccatggtgtcacctcggccccggacaacaggcccgccttgggctccaccgcccctccagtccacaatgtcacctcggcctcaggctctgcatcaggctcagcttctactctggtgcacaacggcacctctgccagggctaccacaaccccagccagcaagagcactccattctcaattcccagccaccactctgatactcctaccacccttgccagccatagcaccaagactgatgccagtagcactcaccatagctcggtacctcctctcacctcctccaatcacagcacttctccccagttgtctactggggtctctttctttttcctgtcttttcacatttcaaacctccagtttaattcctctctggaagatcccagcaccgactactaccaagagctgcagagagacatttctgaaatgtttttgcagatttataaacaagggggttttctgggcctctccaatattaagttcaggccaggatctgtggtggtacaattgactctggccttccgagaaggtaccatcaatgtccacgacgtggagacacagttcaatcagtataaaacggaagcagcctctcgatataacctgacgatctcagacgtcagcgtgagtgatgtgccatttcctttctctgcccagtctggggctggggtgccaggctggggcatcgcgctgctggtgctggtctgtgttctggttgcgctggccattgtctatctcattgccttggctgtctgtcagtgccgccgaaagaactacgggcagctggacatctttccagcccgggatacctaccatcctatgagcgagtaccccacctaccacacccatgggcgctatgtgccccctagcagtaccgatcgtagcccctatgagaaggtttctgcaggtaacggtggcagcagcctctcttacacaaacccagcagtggcagccgcttctgccaacttgtagggcacgtcgccgctgagctgagtggccagccagtgccattccactccactcaggttcttcaggccagagcccctgcaccctgtttgggctggtgagctgggagttcaggtgggctgctcacagcctccttcagaggccccaccaatttctcggacacttctcagtgtgtggaagctcatgtgggcccctgaggctcatgcctgggaagtgttgtgggggctcccaggaggactggcccagagagccctgagatagcggggatcctgaactggactgaataaaacgtggtctcccactg

SEQ ID NO: 752 - DNA, 147 bp, Homo sapiens; identical to SEQ ID NO: 477

SEQ ID NO: 753 - DNA, 4466 bp, Homo sapiens; identical to SEQ ID NO: 483

SEQ ID NO: 754 - DNA, 975 bp, Homo sapiens
cacttcggaggattgctcaacaaccatgctgggcatctggaccctcctacctctggttcttacgtctgttgctagattatcgtccaaaagtgttaatgcccaagtgactgacatcaactccaagggattggaattgaggaagactgttactacagttgagactcagaacttggaaggcctgcatcatgatggccaattctgccataagccctgtcctccaggtgaaaggaaagctagggactgcacagtcaatggggatgaaccagactgcgtgccctgccaagaagggaaggagtacacagacaaagcccatttttcttccaaatgcagaagatgtagattgtgtgatgaaggacatgatgtgaacatggaatcatcaaggaatgcacactcaccagcaacaccaagtgcaaagaggaaggatccagatctaacttggggtggctttgtcttcttcttttgccaattccactaattgtttggggaaacagtggcaataaatttatctgatgttgacttgagtaaatatatcaccactattgctggagtcatgacactaagtcaagttaaaggctttgttcgaaagaatggtgtcaatgaagccaaaatagatgagatcaagaatgacaatgtccaagacacagcagaacagaaagttcaactgcttcgtaattggcatcaacttcatggaaagaaagaagcgtatgacacattgattaaagatctcaaaaaagccaatctttgtactcttgcagagaaaattcagactatcatcctcaaggacattactagtgactcagaaaattcaaacttcagaaatgaaatccaaagcttggtctagagtgaaaaacaacaaattcagttctgagtatatgcaattagtgtttgaaaagattcttaatagctggctgtaaatactgcttggttttttactgggtacattttatcatttattagcgctgaagagccaacata

SEQ ID NO: 755 - DNA, 2692 bp, Homo sapiens
tgtgtaacaatctcgcaaagacgttcccctccgtctcctcatcctcttttcaaacccttttacgatttcccatctcactcagcatgacagtcaaagtccctgtgatggccaacttctgcatcacctagccagtctgccaccgccaaaactctccagcctcatctttctactcttcccctggttccttgcccacgcctttacacttgttctctgcttggaatcttccctcccctccttgaggaactttctcaaatgtcaccttccctcaatactccccctcctccatttaaaactataaacttccaactctctaagcccctaaagtactctatatttaacttattgtataaactactgtccctacttgtaagttccaagattgcagggattcacccgctttgttcactgctgtctgccaaggtctagaacagtgcaagttacccaacaggagttcaataaacagccattcatttaacaaatatttgctgagcacttcgtcccgtccaagtttgttaaatcaagacaaataagacaccgtccctgcctttaacgcaccagatggagaaatgcaccacagacataaatgtgcaatacaggcctgacactacggccacaagcaagtcaaagaacgtgccaaaagttcagaggaagaagcctcggcttcgcctttcgggagaccagtccagctttccaccatcacgctgctcatcagggaccatctccgggggtctcctctagaccccaagggaggagcgggtcccgcccgccattcccaggtctcagagtttacttgtccagagatgcaacttccggcctcttcaggccgggcaagatttaaggaaagaaaagaaacataaggacctccgttcttcggtctccgtcccctccccttcccccgcgtgccgtccccacaacgggccaggactgaacccaactctcgaccaactcccggcagcaaaactaagcaccctacttccgttgtccccacctgttcccggcgtccccttcggctactcccggcgtttgcgcaagcggtcccacgtgggctcgggcggggctagcgccgcggcgggggctgggcacgcccctagcgcatagctggcttctgattggctttccggtgctcgcccgagcagggttggggcgagtggaccgcgcctctaaaggcgcttgccagtgcaatctgggcgatcgcttcctggtcctcgcctcctccgctgtctccctggagttcttgcaagtcggccaggatgtctcaggtacagcgcgtgcacagccaggctgcgaaggtgcagcgggcgggaggcccgttgggggctcagccggctgccagaagctctcgggctctttccttccgtgcccctcacttgctcatgggcccatgcctagccctgattcgttggacagagccttgtgagcgggattttccgtttggggatttctaaatctgctgcccaccccgcaactgccggaaagttgcccatggggtggacttcgctgtgtagcgggagaggggtgggagtcgagggtgcttgatggagagatgggggaaggggttgcacggattggaggagcgaggagactcagtccccatcccgaagcacagggcaggacgtcgcggcggagtggggaagcgaggagtccgtggccgggagcttggaggtcaggggaagtacggggccggctgctcagagtgcgggacgaggagaatcgcggcccggggagaggtgacccaggggcccctcccttctctccagtgtagacccttgtctgagaccgagctatgtggggcgacctctggctcctcccgcctgcctctgccaatccgggcactgggacagaggtcggtgttgaacgcgcgggccccagggggagggaggggaccaacgggctccggcgctgacaccgcggcactcatgccctgtcccctttcagctgtttccagcatactgtgccccgtctgtcctcaggccagggcttcgctgcagccccggccactccctagtgcctggcccggtggtggccaggcagttggccgcgctgcttctcccgcagaggggacccccactggggcgaaggcttggcctgccctcttcactgctgtatttccagacctgatgcctgcgtttgtgagagctctggatatatggttttcgattgaatgagtgaactggaggggcttccccttcttgtgttgctgaatctttctagctgccctgttggggcagggaggggcagacacacttcaggggctgcattgcccgaagggtgccacctttcccacctctccatccccgtaactgggctgtcatcaggccacagtaggattcttaccctctcccacccagaggaggccctcaatcctctcctctcccttccatttaggctgagtttgagaaagctgcagaggaggttaggcaccttaagaccaagccatcggatgaggagatgctgttcatctatggccactacaaacaagcaactgtgggcgacataaatacaggtatgcagagcgggggttggaagggcatctgctcatcaaagcaggctcagcagcccagactggaagtccctgggaacttcactctcaaactgcctgaggccctactcttcaggtggggtatggtgatggttcctgaggtggaaaagaccatgttccggattctcagtgtctccagtagtaacagaattc

SEQ ID NO: 756 - DNA, 1922 bp, Homo sapiens; identical to SEQ ID NO: 142

SEQ ID NO: 757 - DNA, 1763 bp, Homo sapiens
cccgggacggcagcaggtgggctgcacacggactctgggacaagtcgagctgaaaaccgcggagcaggggtggggtggagacgcccgcgacgccaaggctggggtcccggaacacgctgggaggagggtggaaggcaacctcggggaaactgggaaaggcggcctggacttcgggaacaccgcgtacctgcgggggcacagcccacccgagcgaacgggctccaaagggaaggtcccgcggtgcccaccggcagagctcagggggtggtgcgcccggcccttctgcggcgcacagcccagcccaggaacgcgggcggtgcggactcagcgggccgggtgcaggcgcggagctgggcctctgcgcccggcccgacctccgtctataaatagagcagccagttgcagggctccattctgctttccaactgcctgactgcttgttcgtctcactggtgtgagctccagcatcccctttgctcgaaatggaccccaactgctcttgcgccactggtaagggaagctctgcgccctggaatccccatttcccagccctattacagagggtctctgggtttcaggaagtcgcattttaagttctgagcgacggggactccagtacttcgttagatgctttcttcctgatcacgcccctgagagcattgccctcatccctgggcctctacgtcagagttaagaatactgaggctcaaggctgaactgctccacatcacccagttggtcatgggcctgctggctgggccccagtgctctgtccaggctctgagcaatcagtgtggttgggggtgctggaaacattgactcttcagagttcaggacagaaggttctggctcgcagtctcaatattcctgggttgtatgtgcacgtgggaccttcctggtgcggtaaaacaggagggtccttgccccttccccagcgttagtgagaggacatggggcttctgttcctctgtcctgagtgggaaaggagctctgagggctggccctgcacagaggagggggcactggagactcactgacccactgctgtaccttctgcatctcactcactgcccactgcgttttcctcttccttgtaggtggctcctgcacgtgcgccggctcctgcaagtgcaaagagtgcaaatgcacctcctgcaagaagagtgagtgcggggccatctccaggaatctggggctgtggctcaggttgggagggaactcaaggctggccctgagtgcatccttctggggaactgggctttctttgccctcattgcccgtgtcattccctctccaggctttctgccctaaattcagatggggcaggacagcatttttctcgtgggacacaaaccccaactgtaccccctatggtttcagaacagagctgtgccagacgaaaaaaagcatcctctgggtctgggttctgagctcgagccaggcttgctattagggcagggaggtgcccggtcaagtctactgccacctctcactctccccttcttccccaggctgctgttcctgctgccccgtgggctgtgccaagtgtgcccagggctgcgtctgcaaaggggcatcggagaagtgcagctgctgtgcctgatgtgggaacagctcttctcccagatgtaaatagaacaacctgcacaacctggatttttttaaaaatacaacactgagccatttgctgcatttctttttatactaaatatgtgactgacaataaaaacaattttgactttaatcttactccctgttcttct

SEQ ID NO: 758 - DNA, 2139 bp, Homo sapiens; identical to SEQ ID NO: 143

SEQ ID NO: 759 - DNA, 929 bp, Homo sapiens; identical to SEQ ID NO: 502

SEQ ID NO: 760 - DNA, 405 bp, Homo sapiens
cagactctccaccagcagcagcagcagcagcagcagcagcaagagaagcttccaattaggcagggggttgtacgctccctgtcctatgaggaacccagaagacactcaccccccattgagaagcagctctgtccagccattcagaaactcatggtcaggagcgcagacctccacccattgtcagagctgcctgaaaaccggccttgtgaaaatggcagtacccattctgcgggagaattttttacaggacctgtccagccagggtctcctcacaacattggaacttctcgtggtgtacaaaatgcttccagaactcagaacctgttcgagaaacttcagagtaccccaggggcagcaaacaagtgtgaccctagtacaccagcacctgccagctcagctgccctg

SEQ ID NO: 761 - DNA, 339 bp, Homo sapiens
tgcttgggtacctcttgcaataaccagctcttagttgttccctttccctggggcttttccatttaacacatggagcccttcccccagaaggctacttccttgttttagaggaaggtactgcccattgggagatggggacattgggacctcagcaatgaagaacccttgtgaagtaaccaggaggaatggggaaagaagcaagttgggcaggatatggcctacttccataggcttttcttttttcagttttatgtaagcatggcttacatccccagtacatacttttactattgtggatacctgcactagtagcagtaagtcacaattgtgtctctcact

SEQ ID NO: 762 - DNA, 303 bp, Homo sapiens
acagagtggtgcaagacactgtagattaacggtagaggagaaattgtgcccttagtgttaacaatgtgccttttgttctgaatgccatgttgtagggcatgcattttttggcctctttaactcttcgaattctagtcagtaagatggaacccatctctgcaaagatacatctgtcttaaatatctagttacaggccttaatagaaccataaggcatgactcatcttcaggcactgaaaaagataaccatcaggtagtgttacacaaggacttcctatatttaggggttaagatggtcttgttg

SEQ ID NO: 763 - DNA, 583 bp, Homo sapiens
  misc_feature (1)...(583): n=a,t,g or c
ggaaatgaagcaagtgaaatcgaatctgtaaaaattagtgcaaaaaagccaggaagaaagctcaggcccattagtgatgactctgaaagcattgaagaaagtgatacaaggagaaaagttaaatcagcagagaaaataagtacacaacgtcatgaggttattcgaaccacagcgtcttcagaactttcagagaaaccagctgagtctgtcacttctaaaaagacaggaccccttagtgcccagccctctgttgaaaaagagaacttggcaatagaaagtcaatctgaaaactcagaaaaaagggaagatatctcatgacaaaaggaagaaatcaagaagtaaagccataggtccagatacttctgacattgtgcacatttggtgtccagaaggaatgaaaaccagtgacatccaggagttggatattgttttgcctgaatttgagaaaacccncctagagcatcnaccaagaataggatctaaagtttgttangcagccatcgccacattttatgttatgtttaagaccattctccaatgcnttaagaagccagtgttgccaatctgaaaggaagatgctagt

SEQ ID NO: 764 - DNA, 298 bp, Homo sapiens
  misc_feature (1)...(298): n=a,t,g or c
cttcgccgggccccaggctcagcaggccgcccgggnaagtcaacacggcgtcgctgttccgcatcgggcaggagacagtccaggacatcgtgtaccgcaccatggagatcttccagctcctgaggaacatgcagctgccaaatggtgtcacttaccacactggaacatatcaagaccggttaacaaagctacaggataatcttcgccaactttcagttctcttcaggagctgagattggtttatgacaaatgcaataaaactgtggtgggatggatccattccagtcgagcactattc

SEQ ID NO: 765 - DNA, 533 bp, Homo sapiens
ctttaaaccaatagtcccagaagagaccctctgaaagtctaggactggatattaaaatgcctgaacctgttatctaaatccttttttaagaaacttaatgttccagctcttgaactacactgtggaacagtaatttgtgcccaatttagtggaagataatgaggctcactgtaaacactacattgtcctgcagagtaattctgatgagagtcctactgacttctagagccattctctttaaccgtctgcaggtctaaggattaactatatgtgtgatttgtaataaaactgagttgtacaacactgcctgtgtgtgtgtggccaagacatttgcttcacttttaaaatgcacgtgatctttggagaggtgaattattctacaaattgcaccctaagtctcattgtttaagacctaactgatctaataccatctacacaaaagggtgttgtacttgcagaacttagtttataaaacaaagaatgtgtatttcttcaatagccgggtatttggattgtctcttgataatatttga

SEQ ID NO: 766 - DNA, 433 bp, Homo sapiens
gaaggttgaacctcgaagatcagacccagggacaagtggtgaagcatacaagagaagtgctttgattcctcctgtggaagaaacagtcttttatccttctccctatcctataaggagtctcataaaacctttattttttactgttgggtttacaggctgtgcatttggatcagctgctattttgcaatatgaatcactgaaatccagggtccagagttattttgatggtataaaagctgattggttggatagcataagaccacaaaaagaaggagacttcagaaaggagattaacaagtggtggaataacctaagtgatggccagcggactgtgacaggtattatagctgcaaatgtcctctgtattctgtttatggagagtacctctctgcagcggacaatgatcagatatttcacatcggatccagcctca

SEQ ID NO: 767 - DNA, 320 bp, Homo sapiens
gcaacccaggggaaaaatgcggcctttgactgaagaggagacccgtgtcatgtttgagaagatagcgaaatacattggggagaatcttcaactgctggtggaccggccccatggcacctactgtttccgtctgcacaacgaccgggtgtactatgtgagtgagaagattatgaagctggccgccaatatttccggggacaagctggtgtcgcttgggacctgctttggaaattcactaaaacccacaagtttcggttgcacgtcacagctctggattaccttgcaccttatgccaagtataaagtttggataaagcctgg

SEQ ID NO: 768 - DNA, 368 bp, Homo sapiens
aaatgaatcattatataggtatgtctttgcttccattttgagacatttagatttttacagcctgtttctatagcatttgatgttacaactctaagcgtagttcaaagacatttaaattgacaagttaccagttaaagaatttagaatatattagatcccatctagtattatatattttttctagttgatcattgagcagtaaataccaaatactcgattagaaggtaatttttacattgttttgaaagggtgaaacaatttatctcctctggtattattcttaaaccacagatagggatagtagggtagtgaaacgaataaatacctggtagaagacaagagacttgggctctacacctggctctgca

SEQ ID NO: 769 - DNA, 454 bp, Homo sapiens
gcgataaggagctggttaccattatccccaacttcagtctggacaagatctacctcatcgggggggacctggggccttttaaccctggtttacccgtggaagtgcccctgtggctggcgattaacctgaaacaaagacagaaatgtcgcctgctccctccagagtggatggatgtagaaaagttggagaagatgagggatcatgaacgaaaggaagaaacttttaccccaatgcccagcccttactacatggaacttacgaagctcctgttaaatcatgcttcagacaacatcccgaagcagacgaaatccggaccctggtcaaggatatgtgggacactcgtatagccaaactccgagtgtctgctgacagctttgtgagacagcaggaggcacatgcaagctggataacttgaccttgatggagatcaacaccagcgggactttcctcacag

SEQ ID NO: 770 - DNA, 346 bp, Homo sapiens
tcagctttaaaacttagctgtcgttcagttaagcttaaagataggttaatttgtaaatggcaaagtttgttttgaggtttttcctcaataacttgtttcccaggcctattaggcatctctaaaattgatctagctgttttatttttatgtactcttagttttatgtaagaaaccttaggatgagctcccttttctaaggtgtttttgttttttgtatgtttgcttttttcctgttttttgttttttccatttacggcagtggtaccatgttttggatgtgtgatgtttatatgggagaacaaaaagctgatgtatagccctgtatacagtgtagatactatttttg

SEQ ID NO: 771 - DNA, 464 bp, Homo sapiens
aaaaagttaacttttaacatagctgctcagggattaaatcagattggaaaacccattctgactccacatactgctacaaagaaatacatcgttgtttatattgagctgcaggagatagtacactttaaacttaagaaagttaaatgtttcacaataacattgcaatataatcttcagctactctctttccattggtaaaatctctgatggtgtgataactctttgccaacctacgaaacccatatctggaagaatcaccagctcccgtgagcagcttcatgtaaatagatgcactccaagcagattgcatgcctcaggtgtttgtcttctagtaatcatggagtgtgcaacacccagagtaacactacaaggggcaggactgcaaacagcaggtcctggctaaaaacccttaatgctgcattgctgccagttgtaaagagatgcctgaatggaggcaagttctg

SEQ ID NO: 772 - DNA, 498 bp, Homo sapiens
  misc_feature (1)...(498): n=a,t,g or c
gcacgagggactggggcggccacgcactccgccagaaggtcgccaggagcctccgcccttcaccttcctcggaaatccgccaggccacgncaagctccctgcccaacccttactgacgggggccacattttcccggcctccgcagccagaccttgacacaaaggacatcaaactgccgagggtaaaaaccccggaagggcggacacctccacatcgccttttgccacctttccctttatttccggagatatttattgagtgtctactgtgtgccaggcactatatctatgtgcataganaaaccctggaaggccatacaacagtatatatagagtgatcgtctctgcttgctgagctaacaggggtgtcaagcttccattttggtatctacttctaaatacactcagaacaggagaaatttggactaattttcaaactacagacactttctaatcatgatgcatttcaaaagtggactcgaattaactgagttgcaaa

SEQ ID NO: 773 - DNA, 590 bp, Homo sapiens
  misc_feature (1)...(590): n=a,t,g or c
aacgggtcggagaaaaaggaaaaaagaagggctcagcgcctccccgccgggccgtggacagaggggcacagtttcggcaggcgggtgaggtcgctgagggcccgccggagatgttttccttgtcgagcacggtgcaaccccaggttacagttcctctgagtcatctcatcaatgccttccatacaccaaaaaacacttctntttctctcagtggagtgtcagtttctcaaaaccagcatcgagatgtagttcctgagcatgaggctcccagcagtgagccttcacttaacttaagggaccttggattatctganttaaaaattggacagattgatcagctggtagaaaatctacttcctggattttgtaaaggcaaaaacatttcttcccattggcatacatcccatgtctctgcacaatccttctttgaaaataaatatggtaacttagatatatttagtacattacgttcctcttgcttgtatcgacatcattcaagagctcttcaaagcatttgttcagatcttcagtactggccagttttcatacagtctcggggttttaaaactttgaaatcaaggacacggcgg

SEQ ID NO: 774 - DNA, 439 bp, Homo sapiens
gagcaggacatcccgctggtggagagctactcctttgaggcccgaatggaagtggatgcagatggaaatggtgctaagatatttgcctatgcctttgacaagaaccgaggaaggggctctgggagactccttcatgagctgctgtgggagcggcaccgggggggcgtggcccgggcttccaggtggtgcacctcaacgctgtgaccgtggacaatcgcctggacaacctgcaactggtgccgtggggctggcggcccaaggctgaagagacctccagcaagcagagggagcaaagcttgtattggcttgcaattcagcagctgcctacagaccctatagaagaacagtttcctgtcctaaatgtgacccggtattataatgccaacggggatgtagtggaagaggaggagaactcttgcacctactatgagtgccacta

SEQ ID NO: 775 - DNA, 318 bp, Homo sapiens
  misc_feature (1)...(318): n=a,t,g or c
tagattgtaagcaaaagaaatcaaggtcaagatctggaagcaagaagaaaatgctaacattacctcatggtgctgacgaggtttacattctccgatgcaggttttgtggcctagtctttcgaggacccttgtctgttcaggaagactggattaagcacttacaacgacatattgtaaacgctaatcttccacggactggagctggcatggtggaagtcacgtcactacttaaaaagcctgcctccattacagaaacttcattttctctacttaatggccgaagcagctttcataggaaccagggnaccttttaaatag

SEQ ID NO: 776 - DNA, 472 bp, Homo sapiens
gacgcgcggggccacactgccgccccctagactggcgctgggactgtgggacaagttggctgggtccgggcttggggactgcaaccggtcttctgtgcttcaccatctacataatgaatcccagtatgaagcagaaacaagaagaaatcaaagagaatataaagaatagttctgtcccaagaagaactctgaagatgattcagccttctgcatctggatctcttgttggaagagaaaatgagctgtccgcaggcttgtccaaaaggaaacatcggaatgaccacttaacatctacaacttccagccctggggttattgtcccagaatctagtgaaaataaaaatcttggaggagtcacccaggagtcatttgatcttatgattaaagaaaatccatcctctcagtattggaaggaagtggcagaaaaacggagaaaggcgctgtatgaagcacttaaggaaaatgagaaact

SEQ ID NO: 777 - DNA, 476 bp, Homo sapiens
aattatttgaagaatgtcttcttttaaatgtacatggaatgatagatttggaaaaattaccattttacaacccttaatgtaattaaatctggcaaaaatcgatggtaaaacccattaagtggaaaaaattttaaggaactttgtttacaaggtgtcagaacatcacagatatctattgcaaaagaattgcctttacagtgagatttggctatcaaactgcatttcactacttctggaataagccagcattatgtggctcttgatgggatgcggtatgaagcatgtgtgatcatccttgatgtactgccgaaaatgtttacctcaaatttaattaaatctttcttttgtctagacttatcttcctgtttaaagaaatacaggaatagaggaacaagttgaattacacagtatggaaataaatagacaagtccagagttggtataggacaactggacttttttttttatatatttatt

SEQ ID NO: 778 - DNA, 335 bp, Homo sapiens
ggtggattttcctacagctattggtatggtggtagaaagagatgacggaagcacattaatggaaatagatggcgataaggcaaacaaggcggtccacctactacatagatactaatgctctgcgtgttccgagggagaatatgaggccatttcacctctaaaaaatgggatggttgaagactggatagtttccaagctattttggatcatacctacaaaatgcatgtcaaatcagaagccagtctccatcctgttctcatgtcagaggcaccctggaatactagagcaaagagagagaaactaacagatttaatgtgtgacactacaacatccct

SEQ ID NO: 779 - DNA, 402 bp, Homo sapiens
cgcgactccaggcatcagcaggactcagacctctcagcagcgtgctctgacgctgacctccacagacacaaaaaaaagaagaagaaaaagaagagacattcaagaaaatcagaggactttgttaaagattcagaactgcacttacccagggtcaccagcttggagactgtcgcccagttccggagagcccagggtggatttcctctctctggtggcccgcctctggaaggcgtcggacctttccgtgagagaacgaaacacttacggatggaaagcagggatgacaggtgtcgtctctttgagtatggccagggtgattgaaaactcagcctcaaaacaaaaaattcactagttatgattcaacgcgttcaacagaagccatccccagctcagcttaaatta

SEQ ID NO: 780 - DNA, 415 bp, Homo sapiens
ggcttttattttccatttggaacgtgggacaacagaccacaacgcaattccattttgcaagtctttccaagggagaagctgttcaaccacccgtttgggggatgagtgagccgacactttcctttggtctttctgaatcgtaactgcactgctttctggaccatttctaaggcggcctttacaagaagacattcctgttggagaggagggtggacttcggagaaattctcatactgaagcatgagcttaggagtttctgttagtggtagtggtgttttggacacttcattccttgcaacaccgaggttttgggtgttgacataaagtggaccacacaccacatctgctgccgtcttgacacttttttttgtttggttggttttgttacatcttacattatgcagaactatttttg

SEQ ID NO: 781 - DNA, 1253 bp, Homo sapiens
cggccgggagagtagcagtgccttggaccccagctctcctccccctttctctctaaggatggcccagaaggagaactcctacccctggccctacggccgacagacggctccatctggcctgagcaccctgccccagcgagtcctccggaaagagcctgtcaccccatctgcacttgtcctcatgagccgctccaatgtccagcccacagctgcccctggccagaaggtgatggagaatagcagtgggacacccgacatcttaacgcggcacttcacaattgatgactttgagattgggcgtcctctgggcaaaggcaagtttggaaacgtgtacttggctcgggagaagaaaagccatttcatcgtggcgctcaaggtcctcttcaagtcccagatagagaaggagggcgtggagcatcagctgcgcagagagatcgaaatccaggcccacttgcaccatcccaacatcctgcgtctctacaactatttttatgaccggagaaggatctacttgattctagagtatgccccccgcgggatgctctacaaggagctgcacaagacctgcacatttgacgagcagcgaacagccacggtccggcggatcatggaggagttggcagatgctctaatgtactgccatgggaagaaggtgattcacagagacataaagccagaaaatctgctcttagggctcaagggagagctgaagattgctgacttcggctggtctgtgcatgcgccctccctgaggaggaagacaatgtgtggcaccctggactacctgcccccagagatgattgaggggcgcatgcacaatgagaaggtggatctgtggtgcattggagtgctttgctatgagctgctggtggggaacccaccctttgagagtgcatcacacaacgagacctatcgccgcatcgtcaaggtggacctaaagttccccgcttctgtgcccacgggagcccaggacctcatctccaaactgctcaggcataacccctcggaacggctgcccctggcccaggtctcagcccacccttgggtccgggccaactctcggagggtgctgcctccctctgcccttcaatctgtcgcctgatggtccctgtcattcactcgggtgcgtgtgtttgtatgtctgtgtatgtataggggaaagaagggatccctaactgttcccttatctgttttctacctcctcctttgtttaataaaggctgaagctttttgtaaaaaaaaaaaaaaaaata

SEQ ID NO: 782 - DNA, 2192 bp, Homo sapiens
cggcacgagctaggatctgtgactgccacccctccccccacccgggctcggcgggggagcgactcatggagctgccgtaagttttaccaacagactgcagtttcttcactaccaaaatgacatcattttccacctctgctcagtgttcaacatctgacagtgcttgcaggatctctcctggacaaatcaatcaggtacgaccaaaactgccgcttttgaagattttgcatgcagcaggtgcgcaaggtgaaatgttcactgttaaagaggtcatgcactatttaggtcagtacataatggtgaagcaactttatgatcagcaggagcagcatatggtatattgtggtggagatcttttgggagaactactgggacgtcagagcttctccgtaaagaacccaagccctctctatgatatgctaagaaagaatcttgtcactttagccactgctactacagatgctgctcagactctcgctctcgcacaggatcacagtatggatattccaagtcaagaccaactgaagcaaagtgcagaggaaagttccacttccagaaaaagaactacagaagacgatatccccacactgcctacctcagagcataaatgcatacattctagagaagatgaagacttaattgaaaatttagcccaagatgaaacatctaggctggaccttggatttgaggagtgggatgtagctggcctgccttggtggtttttaggaaacttgagaagcaactatacacctagaagtaatggctcaactgatttacagacaaatcaggatgtgggtactgccattgtttcagatactacagatgacttgtggtttttgaatgagtcagtatcagagcagttaggtgttggaataaaagttgaagctgctgatactgaacaaacaagtgaagaagtagggaaagtaagtgacaaaaaggtgattgaagtgggaaaaaatgatgacctggaggactctaagtccttaagtgatgataccgatgtagaggttacctctgaggatgagtggcagtgtactgaatgcaagaaatttaactctccaagcaagaggtactgttttcgttgttgggccttgaggaaggattggtattcagattgttcaaagttaacccattctctctccacgtctgatatcactgccatacctgaaaaggaaaatgaaggaaatgatgtccctgattgtcgaagaaccatttcggctcctgtcgttagacctaaagatgcgtatataaagaaagaaaactccaaactttttgatccctgcaactcagtggaattcttggatttggctcacagttctgaaagccaagagaccatctcaagcatgggagaacagttagataacctttctgaacagagaacagatacagaaaacatggaggattgccagaatctcttgaagccatgtagcttatgtgagaaaagaccacgagacgggaacattattcatggaaggacgggccatcttgtcacttgttttcactgtgccagaagactaaagaaggctggggcttcatgccctatttgcaagaaagagattcagctggttattaaggtttttatagcataatggtagtacgaacataaaaatgcatttattcagttcacttaccacattatttgaaaatcaatcctttatttaattttatttccaacctgtcagagaatgttcttaggcatcaaaatccaaggtagctgtaagaaaaatactggagctaacaatgaagaacagaagtaatctgattagtcaaattattaagtgccatggattactttatgcagcagtcaggtacatagttaggtgaacccaaaagaaaaactcttgaaaacaagagatttcttccatgcacatttacaatattgaggtataattaacatgataaagtgtttccttctaacgagttgtagaaatctgagtaaccacccaaaaaagcaatagaatgtttgtgtcaccccaaaacactcccttctgcccctcttcagacagtccttcagctatttcatggctctcaccctagtttttttttttttttgcacttttttttttccgggggtataggggaggtgtggggcgacagggtctgtcttgttctgtctcccaggctgaagtgcagtgagtcaagattgagccactgcactccagcctgggtgacagcgcgagactccatctcag

SEQ ID NO: 783 - DNA, 348 bp, Homo sapiens
gmaaatgcatggcaaagtwtcgtmttctcgtagactatctagcatgcagagtgtagtgtgttgaaacggtgtatgacattgctgtatcaaagttgtaaaattaagcattatttattgaaaactatgtatttttttgtaaaaacctgatcacatagagaatatcagtggcttgtgcttgtgcttcgrtctaaccagcttcttgacccacccccccytggtatgcagtgttaatgctcagggttgaaatagtacactccaatgtctcttttgcaagagtttttcacagrggattacatttgttcaaaagactctaataaaattgtgtgatcaatcttcaaaaaaaaaaaa

SEQ ID NO: 784 - DNA, 428 bp, Homo sapiens
ggagcccatttgaggggcagagggcggacagtatatggtgcagtccgagcggtacctccaacagccatccccgcctatccaggggtggatatgcagcctacagatatgcacagcctgctactgcaaccgcagccaccgctgctgcagccgctgcagccgcttacagtgacggttatggcagggtgtacacagccgacccytaccatgcccttgcccctgccgctagctatggagttggcgctgtggcgagtttataccgaggtggctacagccgatttgccccctactgaagtgacgtgagacccctgaaatgggactttctgtactcttggaagctgggctccttaaaggaggcctctagtgacacctttatctccatgccctcttagagccaaagagcttcccaaaggaattttccagaattccta

SEQ ID NO: 785 - DNA, 374 bp, Homo sapiens
  misc_feature (1)...(374): n=a,t,g or c
cagtaacatagagcttttagcggntcaagaaggaataaaagttcttgaaacactggttgctcttggtgaagaacaaaacagagtccagctacttgctcttttagttcccactttgatatcttacctgctggatgaaaattcttntgcctcagcaagttcagcttccaaagatcttcatgagtgtgcactccagaatttaatgcatatnggncctctgtatccacatgcttncaagacagtaatgggggctgctcctgagttgaaagtgcgtctagaaactgccgttcgagcaagccaagcgagcaaagctaaagcggttgtcagacaaccagcccccgccatacattctgcaccancaatttaagctaaaaaca

SEQ ID NO: 786 - DNA, 424 bp, Homo sapiens
  misc_feature (1)...(424): n=a,t,g or c
gtatataggttttatctctggttgaatccctcgaacaatagacagtacctttcncccccctttcatggcccattttattgtctgcctttcagtactaagtatgaccgctcctatctcagatcttaataaaaagaaaaaaaaaaacgcatncaggttaaattnggccttaatttaatatacttgttagcaagcgtgtgtgacagagagtggggaaagctacatcattgaatatttggataaactttaccgacttgagtttggtttattttncccttttcctaaattaactagcactgactgtaatttatttccctgtttcacgtctctcccttccattctgcaggaggttttagctatttgggatcggggaccatcagttttggaacttttagagagtgtttcttgactcttaaaaccccttttt

SEQ ID NO: 787 - DNA, 409 bp, Homo sapiens
  misc_feature (1)...(409): n=a,t,g or c
ttcatataggaataaataaaaaggaggaccacttgtgagccaacctaggaaggacttgccagaaagtagcagctcctgctnanaaatacagtgccttcaaaatgattctctgtgtgaattgcatgcaatttcatgtaaccataaagtgtaacctgtatgtgcatgacatgtgtctagaatgtgtaaagttaggattcagcaggaaggggcctggcctgttcactgtggtggatcagtggacctgctgaagtcactggactcatgtgacttaggtttgcagcatcagacccctgtgtttgcattaagtgggccacatcgttgaaatcggatccaatctctccctcagctttcttttcctactttgcagctttgctgggttttaactgctttcattcttctggcttcttgg

SEQ ID NO: 788 - DNA, 398 bp, Homo sapiens
  misc_feature (1)...(398): n=a,t,g or c
gcgttgacaaatcagatgatcagctttatccaagaaagaagactagtannttgtctgcctcctatagcagaaaggtgaatgtacaaactgttggtggccctgaatccatctgaccagctgctggtatctgccaggactggcagttctgatttagttaggagagagccgctgataggttaggtctcatttggagtnttggtggaaaggaaactgaaggtaattgaatagaatacgcctgcatttaccagccccagcaacacaaagaatttttaatcacacggttctcaaattcacaaatgttaacatgggtaagtgatccatgggtgtgcgagtgggtcaattnagtagtacagtgggaacctgtttaaatggcataacctaatttttcccnggggant

SEQ ID NO: 789 - DNA, 500 bp, Homo sapiens
  misc_feature (1)...(500): n=a,t,g or c
ctcggcgtggtgtagctccggtagaaggcccccaacccctcggtcctccacaccgtccggatgcagctgattgctgaccggtgctgcgagttgtacatctgcaagcgctgcttcaccacttctgctggattcattaccgcatcgtggagcagggtggccatactcccagctatccctgcaaaacaaactccagaaaattaccctctgcgatcgggtgttctcaggaagttcctggaacctaaaatcagacggaacccaggacttagctttctaagaagcaaaatgtactaccagctccgcccaggtgagcactgactcttaaaaccctgaagtgatggtggaaatatgataaaaatggggatggttaatttaggcacactcaaccacattttaatcttgcaaaaacatggttttctttcttgtagttcaacctgggaaaaagttaaacnggcaagtgtttggtggttcccagaanccacacacctgggttttttccatgt

SEQ ID NO: 790 - DNA, 442 bp, Homo sapiens
  misc_feature (1)...(442): n=a,t,g or c
ggcagagctgaaacttattccaagctttcaaaataatcttttaagaagccaggattctccggtctggaatttctgagtgagtcctttttttatggtgtcctccctctgtgaatgtacaggcggaactgtacgaacagctcccttccatccatttttaactctttcggaaataacacctcacagcagcttcgtgcttttgtacagacctttgtaacaagtgtacagaaaactcattttgtttgagaaacaggagttgatgaacccatcatgctggtttttctctgaggcacaaagttttaggctgtacacagccagccttggggaatctcgttgagncgttcggcgtgggatccacggggnccagggncaccctgncgggagcgcccancacgcattccacntcgggattncagtggggtgaaggacagaactctgtagtttn

SEQ ID NO: 791 - DNA, 11893 bp, Homo sapiens
ccgcgcgtccctgtgcgtccccgggtccctgcgggcgggcgggcgcggtcgccgccgagcaacccggcctgcgcccggcacgactgtagatgtcaggctttgcccggggagccgagcggcagcggggctgtgagtttcaaattaaccttccgctttgttgctgtgtaatgtggatccccgaaggccccccgccccgcccgccccccttccccgggcggtgcgcgctgcaaactgcgagttgggcttcatttacataaagcgattccgggcgggcggcggaagaggaggaggcggcggcggcgggcaggccggggacccggacgccagcgccgcgccccgtgggtgaatccccgccgcgtcccggggacctccctccggggacgggccgaccgccagccctgccgccaccatgagctcccctcccctgtctccgggccccctgctcctgaccagagccacctccgagtcctggggccagcgggaggtggggagcataccgcctggggtgggtgagctcggggctcgggtgccactggaatttcccgttgttgcgcatggcggcgcggcccccggacctgcaagtgccgcctccctccggaggtgcgcggaggcttggtgtgccaggtccgagcctccgtactgggtgcaatgaaagctccacgcaggccttaccatggaaggctgtgactcgcccgtcgtctcggggaaggacaatgggtgcggtatccctcagcaccagcaatggactgaactcaacagcacccacctccctgacaaacccagtagcatggaacagtccacaggcgagagccacgggcccttggacagcctgagggcccccttcaatgagcgcctcgcggagagcaccgcgtcggccgggccccccgccgagcccgccagcaaggaggtcacctgcaacgaatgttcggcctcctttgccagcctccagacctacatggagcaccactgccccagcgcgcgccccccgccacccctgagagaggagagcgctagcgacaccggtgaggagggggacgaggagagtgacgtggagaacctggccggggagatcgtctaccagccggacggctccgcatacattgtggagagcctgagccagctgacccagggcgggggcgcctgtgggagtggcagtggcagtgggcctctcccctcgcttttcctgaactctctccctggcgcggggggcaagcaaggggacccttcgtgtgctgcacccgtgtacccgcagatcatcaacactttccacatagcctcatccttcgggaaatggtttgagggcccagaccaggctttcccgaatacctcagccctggcggggctcagccccgtcctgcacagcttccgcgtgtttgacgtgcgacacaaaagcaacaaggattacctgaacagcgacggttctgccaaaagctcctgcgtatccaaagatgttcccaacaatgtggacctgtccaaattcgatggctttgtgctctatggcaagaggaagcccatcctgatgtgtttcttgtgcaaactctcctttgggtacgtccgttcgtttgtgacccacgcggtgcatgaccatcgaatgaccctgagcgaagacgagcggaaaattcttagcaataagaacatctccgctatcatccaagggatcggcaaagacaaggaaccccttgtaagttttctggaaccaaaaaacaaaaactttcaacaccctttagtttccacagctaacctcataggccccggacacagtttttatggtaaatttagtggcattcgaatggaaggggaggaagctctcccagcgggctccgccgctggccccgagcagccccaggctggtctcttgacccccagcaccctgttgaaccttggcgggctcaccagctcggtactgaagacccccattacctcagtccccctgggggctctggcttccagtcctaccaaatcctcagagggcaaggactctggggcggcagaaggagagaagcaggaagtgggcgacggggattgcttctctgagaaggtagagccagccgaagaggaggcggaggaggaagaggaggaggaagaggcggaggaggaggaggaagaagaggaggaggaagaagaggaggaggaagacgagggttgcaaaggactctttccaagcgagttggatgaggaactggaggacaggccccatgaggagcctggggccgcagcaggtagtagcagcaaaaaggaccttgctctctcaaaccaaagcatttctaactcccccttaatgcctaacgtgctccagaccctgtcgaggggcacagcttctactagttctaattctgcttcttcctttgttgtctttgatggtgcgaacaggaggaatcgtttaagctttaacagtgagggcgtcaggaccaatgtggcagagggcggcaggaggctggacttcgctgacgaaagtgccaataaagacaatgccacagcaccagaaccaaatgaaagtacagagggtgacgatgggggcttcgttccccatcaccagcacgctggctccctctgcgagcttggggttggggagtgcccctcggggagtggcgtggagtgccccaaatgcgacacggtcctgggctcctcccgctcgctgggcggccacatgaccatgatgcattctcgtaactcgtgtaagacactcaagtgccccaagtgcaactggcactataagtaccagcagaccctggaggcacacatgaaggagaagcacccggagccggggggctcctgtgtctactgcaaaagcgggcagccccacccccggctggcacgaggcgagagctacacgtgtggttacaagcctttccgctgcgaggtgtgtaactactccacaactaccaaaggcaacctcagtattcatatgcagtctgacaagcatctcaacaacatgcagaacctacagaatggagggggggagcaggtcttcatccacactgccggggcggcggcggcggcggcggctgcggcggcggcggcagccaatatcagtagctcctgcggggccccctcgcccaccaaaccaaaaaccaaacccacctggcggtgcgaggtgtgtgattatgagaccaacgtggccaggaacctccgcattcacatgaccagtgagaagcacatgcataacatgatgttactgcaacagaacatgacccagatccaacacaaccaccaccgggtcctcggcagcctgccctcacccgccgaggccgagctctaccaatactacctggcccagaacatgaacctgcccaacctgaagatggacagtgctgcctcggacgcccagttcatgatgagcggattccagctggatcccgccgggcccatggccgccatgacgcctgctctagtgggcggtgagatccccctagacatgcggctcgggggcgggcagctggtgtcagaggagctgatgaacctgggcgagagcttcatccagaccaacgacccgtcgctgaagctcttccagtgcgccgtctgcaacaagttcacgacggacaacctggacatgctgggcctgcacatgaacgtggagcgcagcctgtcggaggacgagtggaaggcggtgatgggggactcataccagtgcaagctctgccgctacaacacccagctcaaggccaacttccagctgcactgcaagacagacaagcacgtgcagaagtaccagctggtggcccacatcaaggagggcggcaaggccaacgagtggaggctcaagtgtgtggccatcggcaaccccgtgcacctcaagtgcaacgcctgtgactactacaccaacagcctggagaagctgcggctgcacacggtcaactccaggcacgaggccagcctgaagttgtacaagcacctgcagcagcatgagagtggtgtagaaggtgagagctgctactaccactgcgttctgtgcaactactccaccaaggccaagctcaacctcatccagcatgtgcgctccatgaagcaccagcgaagcgagagcctgcgaaagctgcagcggctgcagaagggccttccagaggaggacgaggacctggggcagatcttcaccatccgcaggtgcccctccacggacccagaagaagccattgaagatgttgaaggacccagtgaaacagctgctgatccagaggagcttgctaaggaccaagagggcggagcatcgtccagccaagcagagaaggagctgacagattctcctgcaacctccaaacgcatctccttcccaggtagctcagagtctcccctctcttcgaagcgaccaaaaacagctgaggagatcaaaccggagcagatgtaccagtgtccctactgcaagtacagtaatgccgatgtcaaccggctccgggtgcatgccatgacgcagcactcggtgcaacccatgcttcgctgccccctgtgccaggacatgctcaacaacaagatccacctccagctgcacctcacccacctccacagcgtggcacctgactgcgtggagaagctcattatgacggtgaccacccctgagatggtgatgccaagcagcatgttcctcccagcagctgttccagatcgagatgggaattccaatttggaagaggcaggaaagcagcctgaaacctcagaggatctgggaaagaacatcttgccatccgcaagcacagagcaaagcggagatttgaaaccatcccctgctgacccaggctctgtgagagaagactcaggcttcatctgctggaagaaggggtgcaaccaggttttcaaaacttctgctgcccttcagacgcattttaatgaagtgcatgccaagaggcctcagctgccggtgtcagatcgccatgtgtacaagtaccgctgtaatcagtgtagcctggccttcaagaccattgaaaagttgcagctccattctcagtaccatgtgatcagagctgccaccatgtgctgtctttgtcagcgcagtttccgaactttccaggctctgaagaagcaccttgagacaagccacctggagctgagtgaggctgacatccaacagctttatggtggcctgctggccaatggggacctcctggcaatgggagaccccactctggctgaggaccataccataattgttgaggaagacaaggaggaagagagtgacttggaagataaacagagcccaacgggcagtgactctgggtcagtacaagaagactcgggctcagagccaaagagagctctgcctttcagaaaaggtcccaattttactatggaaaagttcctagacccttctcgcccttacaagtgtaccgtctgcaaggaatctttcactcaaaagaatatcctgctagtacactacaattctgtctcccacctgcataagttaaagagagcccttcaagaatcagcaaccggtcagccagaacccaccagcagcccagacaacaaaccttttaagtgtaacacttgtaatgtggcctacagccagagttccactctggagatccatatgaggtctgtgttacatcaaaccaaggcccgggcagccaagctggaggctgcaagtggcagcagcaatgggactgggaacagcagcagtatttccttgagctcctccacgccaagtcctgtgagcaccagtggcagtaacacctttaccacctccaatccaagcagtgctggcattgctccaagctctaacttactaagccaagtgcccactgagagtgtagggatgccacccctggggaatcctattggtgccaacattgcttccccttcagagcccaaagaggccaatcggaagaaactggcagatatgattgcatccaggcagcagcaacaacagcagcagcaacagcaacaacaacaacaacaacaacaacaacaagcacaaacgctggcccaggcccaggctcaagttcaagctcacctgcagcaggagctgcagcaacaggctgccctgatccagtctcagctgtttaaccccaccctccttcctcacttccccatgacaactgagaccctgctgcaactacagcagcagcagcacctcctcttccctttctacatccccagtgctgagttccagcttaaccccgaggtgagcttgccagtgaccagtggggcactgacactgactgggacaggcccaggcctgctggaagatctgaaggctcaggttcaggtcccacagcagagccatcagcagatcttgccgcagcagcagcagaaccaactctctatagcccagagtcactctgccctccttcagccaagccagcaccccgaaaagaagaacaaattggtcatcaaagaaaaggaaaaagaaagccagagagagagggacagcgccgaggggggagagggcaacaccggtccgaaggaaacactgccagatgccttgaaggccaaagagaagaaagagttggcaccagggggtggttctgagccttccatgctccctccacgcattgcttcagatgccagagggaacgccaccaaggccctgctggagaactttggctttgagttggtcatccagtataatgagaacaagcagaaggtgcagaaaaagaatgggaagactgaccagggagagaacctggaaaagctcgagtgtgactcctgcggcaagttgttttccaacatcttgattttaaagagtcatcaagagcacgttcatcagaattactttcctttcaaacagctcgagaggtttgccaaacagtacagagaccactacgataaactgtacccactgaggccccagaccccagagccaccaccacctccccctccaccccctccacccccacttccggcagcgccgcctcagccggcgtccacaccagccatccccgcatcagccccacccatcacctcacctacaattgcaccggcccagccatcagtgccgctcacccagctctccatgccgatggagctgcccatcttctcgccgctgatgatgcagacgatgccgctgcagaccttgccggctcagctacccccgcagctgggacctgtggagcctctgcctgcggacctggcccaactctaccagcatcagctcaatccaaccctgctccagcagcagaacaagaggcctcgcaccaggatcacagatgatcagctccgagtcttgcggcaatattttgacattaacaactcccccagtgaagagcaaataaaagagatggcagacaagtccgggttgccccagaaagtgatcaagcactggttcaggaacactctcttcaaagagaggcagcgtaacaaggactccccttacaacttcagtaatcctcctatcaccagcctggaggagctcaagattgactcccggcccccttcgccggaacctccaaagcaggagtactggggaagcaagaggtcttcaagaacaaggtttacggactaccagctgagggtcttacaggacttcttcgatgccaatgcttacccaaaggatgatgaatttgagcaactctctaatttactgaaccttccaacccgagtgatagtggtgtggtttcagaatgcccgacagaaggccaggaagaattatgagaatcagggagagggcaaagatggagagcggcgtgagcttacaaatgatagatacattcgaacaagcaacttgaactaccagtgcaaaaaatgtagcctggtgtttcagcgcatctttgatctcatcaagcaccagaagaagctgtgttacaaggatgaggatgaggaggggcaggacgacagccaaaatgaggattccatggatgccatggaaatcctgacgcctaccagctcatcctgcagtaccccgatgccctcacaggcttacagcgccccagcaccatcagccaataatacagcttcctccgctttcttgcagcttacagcggaggctgaggaactggccaccttcaattcaaaaacagaggcaggcgatgagaaaccaaagctggcggaagctcccagtgcacagccaaaccaaacccaagaaaagcaaggacaaccaaagccagagctgcagcagcaagagcagcccgagcagaagaccaacactccccagcagaagctcccccagctggtgtccctgccttcgttgccacagcctcctccacaagcgccccctccacagtgccccttaccccagtcgagccccagtccttcccagctctcccacctgcccctcaagcccctccacacatcaactcctcaacagctcgcaaacctacctcctcagctaatcccctaccagtgtgaccagtgtaagttggcatttccgtcatttgagcactggcaggagcatcagcagctccacttcctgagcgcgcagaaccagttcatccacccccagtttttggacaggtccctggatatgcctttcatgctctttgatcccagtaacccactcctggccagccagctgctctctggggccatacctcagattccagcaagctcagccacttctccttcaactccaacctccacaatgaacactctcaagaggaagctggaggaaaaggccagtgcaagccctggcgaaaacgacagtgggacaggaggagaagagcctcagagagacaagcgtttgagaacaaccatcacaccggaacaactagaaattctctaccagaagtatctactggattccaatccgactcgaaagatgttggatcacattgcacacgaggtgggcttgaagaaacgtgtggtacaagtctggtttcagaacacccgagctcgggaaaggaaaggacagttccgggctgtaggcccagcgcaggcccacaggagatgccctttttgcagagcgctcttcaaagccaagactgctcttgaggctcatatccggtcccgtcactggcatgaagccaagagagctggctacaacctaactctgtctgcgatgctcttagactgtgatgggggactccagatgaaaggagatatttttgacggaactagcttttcccacctacccccaagcagtagtgatggtcagggtgtccccctctcacctgtgagtaaaaccatggaattgtcacccagaactcttctaagcccttcctccattaaggtggaagggattgaagactttgaaagcccctccatgtcctcagttaatctaaactttgaccaaactaagctggacaacgatgactgttcctctgtcaacacagcaatcacagataccacaactggagacgagggcaacgcagataacgacagtgcaacgggaatagcaactgaaaccaaatcctcttctgcacccaacgaagggttgaccaaagcggccatgatggcaatgtctgagtatgaagatcggttgtcatctggtctggtcagcccggccccgagcttttatagcaaggaatatgacaatgaaggtacagtggactacagtgaaacctcaagccttgcagatccctgctccccgagtcctggtgcgagtggatctgcaggcaaatctggtgacagcggagatcggcctgggcagaaacgttttcgcactcaaatgaccaatctgcagctgaaggtcctcaagtcatgctttaatgactacaggacacccactatgctagaatgtgaggtcctgggcaatgacattggactgccaaagagagtcgttcaggtctggttccagaatgcccgggcaaaagaaaagaagtccaagttaagcatggccaagcattttggtataaaccaaacgagttatgagggacccaaaacagagtgcactttgtgtggcatcaagtacagcgctcggctgtctgtacgtgaccatatcttttcccaacagcatatctccaaagttaaagacaccattggaagccagctggacaaggagaaagaatactttgacccagccaccgtacgtcagttgatggctcaacaagagttggaccggattaaaaaggccaacgaggtccttggactggcagctcagcagcaagggatgtttgacaacacccctcttcaggcccttaaccttcctacagcatatccagcgctccagggcattcctcctgtgttgctcccgggcctcaacagcccctccttgccaggctttactccatccaacacagctttaacgtctcctaagccgaacttgatgggtctgcccagcacaactgttccttcccctggcctccccacttctggattaccaaataaaccgtcctcagcgtcgctgagctccccaaccccagcacaagccacgatggcgatgggccctcagcaacccccccagcagcagcagcagcagcagcaaccacaggtgcagcagcctcccccgccgccagcagcccagccgccacccacaccacagctcccactgcaacagcagcagcaacgcaaggacaaagacagtgagaaagtaaaggagaaggaaaaggcacacaaagggaaaggggaacccctgcctgtccccaagaaggagaaaggagaggcccccacggcaactgcagccacgatctcagccccgctgcccaccatggagtatgcggtagaccctgcacagctgcaggccctgcaggccgcgttgacttcggaccccacagcattgctcacaagccagttccttccttactttgtaccaggcttttctccttattatgctccccagatccctggcgccctgcagagcgggtacctgcagcctatgtatggcatggaaggcctgttcccctacagccctgcactgtcgcaggccctgatggggctgtccccaggctccctactgcagcagtaccagcaataccagcagagtctgcaggaggcaattcagcagcagcagcagcggcaactacagcagcagcagcagcaaaaagtgcagcagcagcagcccaaagcaagccaaaccccagtcccccccggggctccttccccagacaaagaccctgccaaagaatcccccaaaccagaagaacagaaaaacaccccccgtgaggtgtcccccctcctgccgaaactccctgaagagccagaagcagaaagcaaaagtgcggactccctctacgaccccttcattgttccaaaggtgcagtacaagttggtctgccgcaagtgccaggcgggcttcagcgacgaggaggcagcgaggagccacctgaagtccctctgcttcttcggccagtctgtggtgaacctgcaagagatggtgcttcacgtccccaccggcggcggcggcggtggcagtggcggcggcggcggcggtggcggcggcggcggcggcggcggctcgtaccactgcctggcgtgcgagagcgcgctctgtggggaggaagctctgagtcaacatctcgagtcggccttgcacaaacacagaacaatcacgagagcagcaagaaacgccaaagagcaccctagtttattacctcactctgcctgcttccccgatcctagcaccgcatctacctcgcagtctgccgctcactcaaacgacagcccccctcccccgtcggccgccgccccctcctccgcttccccccacgcctccaggaagtcttggccgcaagtggtctcccgggcttcggcagcgaagcccccttcttttcctcctctctcctcatcttcaacggttacctcaagttcatgcagcacctcaggggttcagccctcgatgccaacagacgactattcggaggagtctgacacggatctcagccaaaagtccgacggaccggcgagcccggtggagggtcccaaagaccccagctgccccaaggacagtggtctgaccagtgtaggaacggacaccttcagattgtaagctttgaagatgaacaatacaaacaaatgaatttaaatacaaaaattaataacaaaccaatttcaaaaatagactaactgcaattccaaagcttctaaccaaaaaaca

SEQ ID NO: 792 - DNA, 958 bp, Homo sapiens
aaaagaaaaggttagaaagatgagagatgataaagggtccatttgaggttaggtaatatggtttggtatccctgtagttaaaagtttttgtcttattttagaatactgtgatctatttctttagtattaatttttccttctgttttcctcatctagggaaccccaagagcatccaatagaagctgtgcaattatgtaaaattttcaactgtcttcctcaaaataaagaagtatggtaatctttacctgtatacagtgcagagccttctcagaagcacagaatatttttatatttcctttatgtgaatttttaagctgcaaatctgatggccttaatttcctttttgacactgaaagttttgtaaaagaaatcatgtccatacactttgttgcaagatgtgaattattgacactgaacttaataactgtgtactgttcggaaggggttcctcaaattttttgactttttttgtatgtgtgttttttctttttttttaagttcttatgaggaggggagggtaaataaaccactgtgcgtcttggtgtaatttgaagattgccccatctagactagcaatctcttcattattctctgctatatataaaacggtgctgtgagggaggggaaaagcatttttcaatatattgaacttttgtactgaatttttttgtaataagcaatcaaggttataattttttttaaaatagaaattttgtaagaaggcaatattaacctaatcaccatgtaagcactctggatgatggattccacaaaacttggttttatggttacttcttctcttagattcttaattcatgaggagggtgggggagggaggtggagggagggaagggtttctctattaaaatgcattcgttgtgttttttaagatagtgtaacttgcttaaatttcttatgtgacattaacaaataaaaaagctcttttaatattagataa

SEQ ID NO: 793 - DNA, 7011 bp, Homo sapiens
cgggccgcatcagccctcctcctgtttgcgctccccagcgtgcaatttatttggggggctaccggggattgaacggagcgggcgagcgctgccaggaggtggggccggccccacctgtcgactgcccgtagtaggcagggagagggcggggtttgtcccatagggcccgccccccagtccctgggtcccgggcgcgcgacgagatataaggcagtcaggaaacaatgcgcctgcagctcgcgctcccgcgccgatcccgagagcgtccgggccgccgtgcgcgagcgagggagggcgcgcgcgcggggggggcgcgctcgtgagtgcgggccgcgctctcggcggcgcgcatgtgcgtgtgtgctggctgccgggctgccccgagccggcggggagccggtccgctccaggtggcgggcggctggagcgaggtgaggctgcgggtggccagggcacgggcgcgggtcccgcggtgcgggctggctgcaggctgccttctgggcacggcgcgcccccgcccggccccgccgggccctgggagctgcgctccgggcggcgctggcaaagtttgctttgaactcgctgcccacagtcgggtccgcgcgctgcgattggcttcccctaccactctgacccggggcccggcttcccgggacgcgaggactgggcgcaggctgcaagctggtggggttggggaggaacgagagcccggcagccgactgtgccgagggacccggggacacctccttcgcccggccggcacccggtcagcacgtccccccttccctcccgcagggagcggacatggactacgactcgtaccagcactatttctacgactatgactgcggggaggatttctaccgctccacggcgcccagcgaggacatctggaagaaattcgagctggtgccatcgccccccacgtcgccgccctggggcttgggtcccggcgcaggggacccggcccccgggattggtcccccggagccgtggcccggagggtgcaccggagacgaagcggaatcccggggccactcgaaaggctggggcaggaactacgcctccatcatacgccgtgactgcatgtggagcggcttctcggcccgggaacggctggagagagctgtgagcgaccggctcgctcctggcgcgccccgggggaacccgcccaaggcgtccgccgccccggactgcactcccagcctcgaagccggcaacccggcgcccgccgccccctgtccgctgggcgaacccaagacccaggcctgctccgggtccgagagcccaagcgactcgggtaaggacctccccgagccatccaagagggggccaccccatgggtggccaaagctctgcccctgcctgaggtcaggcattggctcttctcaagctcttgggccatctccgcctctctttggctgaagctgcccgtgtagtccccaaccgtgtctgtctggcacgtgggtgtgttggtaaacagtttggaaaagtggcgtgggagccagcctccctttgatgattattggagccccaggggacaagggatttgaggtgagggttggcgcttagagaggacaatactggggttggactgtaagggattgaagggggtaccttaagagacactccaaacctgaagtttttttgctgctgcctctttccctaggaaactcacactcccctagggggagaagaagccgagagccttttgtgcaaagccaaaaccttcgtccttttaaaaacctaggtctccagttggctttactttaaaatgccaataataaatgccctcttctcgtgcctccccaccaccacttaccactcgtgcatccctgagacagggagggaagaatgaacactccccattaacagatggaaaaactgaggcttagagatagacaatcactacaagtcagctccagctttctgccatctagccagcccctcttccccaatgctccatcccaaccaggcacctcttccttgatgtttggggtctttgtggtagcttatcttagaagcactacaccttgccttgctgtttgtcctgagatggaaaagtgtccttcttgctccccctcaatagatctccagcgtcagctgctccctggcattcaacaaatattcactggcccctactttgtggcaatctgtgggctacatgctggggtcaaggcagtagaactccaggccctcctctcccatccttgatgcaagtgcaacctcgctgagggcagactggggcatcctgtgccactaaactacattgttcttattctggcatcttagacctccacacccgtgagaaatcctggagagggtatttttgtagagtgtagactgtggctagtgacaaataaattaggaccaagaaagctcactgtagcttttaggaataacttttacacgaccatttgatagggaactggggaatggggtatggaagttttcctacacttgagagaaaaaataggataacaaaaattaaaagtctttttttcctggtccactgtgttaaggtcatttttaaccagcttgctttctacaccaagagtttatgtttgtttaatggctggaaagagaatcttgagatcaaaaaaccaataaagatgtatctctacaacggctggtggagtggtagagtggaaagagcattgctttggaagttggaacattttagtttgagatccagaacgttacaaaggtgatatgtggacttcgctgatctgggcctcagtttccccatttgcacacgatggggttggacttgattgtcctgctgatgacatttccttgtctggatagagtaagacactactctctgaaagggagaatggtgtgcttaaattatttctttcttagatagaatcttcctgagccacgaggcttaacactgaaaattaaaggtttgggatgtaggaaagcctgctgaatcattttctaacctaccctttaacctgaacctgtttgtgagcttctagttcactcacaggccacatggcctggaacaaaatgcaacagattgcaaacaatgaggcggggggtggggaaagtgattggcagcagagctcacccaataggggctaggggctgggtaagacagaattccaaacacagcgtaatcagccaatcatgggctttggggccaggagggctgaatggtcaggtttattaatggagaaataatgcgattgtccacacaatggaagccttcctgacaaaggggctcaagcttcctgatatgcaaagaagctgagaacggagctcttcctttgccgaggccgagatccattaaggtcggacttctgtgtggaggctgcaaaatgtgtggagcaggaggagacttttctcccaattgcccctctcctggttaggttaacctaagagaccttcaagccagtgaatgagaagggcgtgtccaggtgtctccaggtctctggtgttatgagccccatatctgggacattctgctgcccagtctctgcctctggtgcaggtagtttggaaatggtcgcttgtacctttgtgaagttcctgcagcttcgccgacctatgattacaaatctaaccttctagtccagggaaggaggtggggcaggcgacctataaatgatggatgactttagaaacccattgaacccaggagcaaaatgctcctaagggaaaccctttccctcccctctgtgggtgaagagggatgggttgtagccctcccttctctgaatcttcagctgaaagggatggcagaatagagaggtgggggaataataggatttataacttgtgaaaagtaacaattccccaagtgcaggctgtgctgggcaggaacaaagggcagctctgcccacagacccctcatttacaattctgatggggcatgaaagagcccgactggggaagatctttatagctaaactttgtcccaggccggtagctctttctctccaacccctccgtgggggaggggagagcctttgcagactgggggctgttggcttgggtctgccttttgttcttatctaagccttgctgtgcaaaaggaaattggagaatattttccttcttgctaatgtcccctcctttccttcactgtgcccttaccacattacaaatgaatcagctttctgctcacctcgatttgtatatatctaaattggaaaaatgtctcctaccttcccaagcaccagcgtagacagctaaagctgtagggtctatgtttgtgtttctcatgggatgtgtttcttctcttgatctcttttctcggacagagaatgaagaaattgatgttgtgacagtagagaagaggcagtctctgggtattcggaagccggtcaccatcacggtgcgagcagaccccctggatccctgcatgaagcatttccacatctccatccatcagcaacagcacaactatgctgcccgttttcctccagaaagctgctcccaagaagaggcttcagagaggggtccccaagaagaggttctggagagagatgctgcaggggaaaaggaagatgaggaggatgaagagattgtgagtcccccacctgtagaaagtgaggctgcccagtcctgccaccccaaacctgtcagttctgatactgaggatgtgaccaagaggaagaatcacaacttcctggagcgcaagaggcggaatgacctgcgttcgcgattcttggcgctgagggaccaggtgcccaccctggccagctgctccaaggcccccaaagtagtgatcctaagcaaggccttggaatacttgcaagccctggtgggggctgagaagaggatggctacagagaaaagacagctccgatgccggcagcagcagttgcagaaaagaattgcatacctcagtggctactaactgaccaaaaagcctgacagttctgtcttacgaagacacaagtttattttttaacctccctctcccctttagtaatttgcacattttggttatggtgggacagtctggacagtagatcccagaatgcattgcagccggtgcacacacaataaaggcttgcattcttggaaaccttgaaacccagctctccctcttccctgactcatgggagtgctgtatgttctctggcgcctttggcttcccagcaggcagctgactgaggagccttggggtctgcctagctcactagctctgaagaaaaggctgacagatgctatgcaacaggtggtggatgttgtcaggggctccagcctgcatgaaatctcacactctgcatgagctttaggctaggaaaggatgctcccaactggtgtctctggggtgatgcaaggacagctgggcctggatgctctccctgaggctcctttttccagaagacacacgagctgtcttgggtgaagacaagcttgcagacttgatcaacattgaccattacctcactgtcagacactttacagtagccaaggagttggaaacctttatgtattatgatgttagctgacccccttcctcccactcccaatgctgcgaccctgggaacacttaaaaagcttggcctctagattctttgtctcagagccctctgggctctctcctctgagggagggacctttctttcctcacaagggacttttttgttccattatgccttgttatgcaatgggctctacagcaccctttcccacaggtcagaaatatttccccaagacacagggaaatcggtcctagcctggggcctggggatagcttggagtcctggcccatgaacttgatccctgcccaggtgttttccgaggggcacttgaggcccagtcttttctcaaggcaggtgtaagacactcagagggagaactgtactgctgcctctttcccaccttcctcatctcaatccttgagcggcaagtttgaagttcttctggaaccatgcaaatctgtcctcctcatgcaattccaaggagcttgctggctctgcagccacctctgggccccttccagcctgccatgaatcagatatctttcccagaatctgggcgtttctgaagttttggggagagctgttgggactcatccagtgctccagaaggtggacttgcttctggggggttttaaaggagcctccaggagatatgcttagccaaccatgatggattttaccccagctggactcggcagctccaagtggaatccacgtgcagcttctagtctgggaaagtcacccaacctagcagttgtcatgtgggtaacctcaggcacctctaagcctgtcctggaagaaggaccagcagcccctccagaactctgcccaggacagcaggtgcctgctggctctgggtttggaagtttggggtgggtagggggtggtaagtactatatatggctctggaaaaccagctgctacttccaaatctattgtccataatggtttctttctgaggttgcttcttggcctcagaggaccccaggggatgtttggaaatagcctctctacccttctggagcatggtttacaaaagccagctgacttctggaattgtctatggaggacagtttgggtgtaggttactgatgtctcaactgaatagcttgtgttttataagctgctgttggctattatgctgggggagtcttttttttttatattgtatttttgtatgccttttgcaaagtggtgttaactgtttttgtacaaggaaaaaaactcttggggcaatttcctgttgcaagggtctgatttattttgaaaggcaagttcacctgaaattttgtatttagttgtgattactgattgcctgattttaaaatgttgccttctgggacatcttctaataaaagatttctcaaacatgtcagagtgggggcagcttatgccacctgagtcctcctcaaccacggaaaactatttcagggtagccacaagtgatccagagggctgcacttctctaaccatgttgctaacctggtcattccactctgggttcctgaaatgccatttcagacatgttgaaacaatgtaggctcagtactcagtgaacacggaattc

SEQ ID NO: 794 - DNA, 676 bp, Homo sapiens
  misc_feature (1)...(676): n=a,t,g or c
caagtctgcaggaaactctggaatcaggaagaaaagctatgttcatactctaaatctggatattaaaattggaagagacttcaaagactgtcaagtggaaagctatcatttcctaaattaaggaacttaggtcaaagttaaatgaaaaagacctaaaaacagaaccaaagacagcctctagatttcttaccctcaagtctcctgttagcatactgcctatacacacagacacaccctctgccacactgctctcttccttccagaagcttggttctactgtaagcaacagctccttcatgggctgagaaggggaaaccaggatctccccaaccaagggcctatacttttatttttcaactctattaactgaactatgcttggagagagccctgaatcctttaactttaatgccatcttaggcctggaagttagagtgagggaaatgagcttggcttctgggactgtgtcaagttgaattttctgncatttaatttcagatcctagctcatcatcagtggagtccagcctacttacttggtactaataaacctttcctaaaaggtttcaancgccttgggtaaagctccagaaatggggcaatgccnagtgactggccaatattgtggctggnctaatgncactgnactgnccccttaaatggnaaattntatggatt

SEQ ID NO: 795 - DNA, 411 bp, Homo sapiens
aaagttcggagcaggacggcttacctgttttctagatttgtcaaatctctcaataagcaaatgaatcctttcattgaggatattttgaatagaatacaagatttattagagctttctccacctgagaatggccaccagtccttactgagcagcgatgatcaactttttatttatgagacagctggagtgctgattgttaatagtgaatatccggcagaaaggaaacaagccttaatgaggaatctgttgactccactaatggagaagtttaaaattctgttagaaaagttgatggctggcacaagatgaagaaaggcaagcctctctaggcagactgtcttaaccatgctgttggatttggcaagtcgaaccagtaaagcttttcagccaacagacagactgtggaaacaa

SEQ ID NO: 796 - DNA, 418 bp, Homo sapiens
  misc_feature (1)...(418): n=a,t,g or c
aaaccatggcttcaaggtgggcatgaagctggaggccgtggacctgatggagccccggctcatctgtgtggccacggtgaaacgagtggtgcatcggctcctcagcatccactttgacggctgggacangaggtacgaccagtgggtggactgcgagtccccagacatctaccccgtcggctggtgtgagctcaccggctaccagctccagcctcctgtggccgcagaaccggcacanccgctgaaggccaaagaggccacaaagaagaaaaagaaacagtttgggaagaaaatcattgctgtgcgtgtgaaggaagagcatctagacgtggcctcgcccgacaaggctttcaagtccagagctgcctgttttccgttcgagaacattcaagcaggaaacagacgattgagcnttcct

SEQ ID NO: 797 - DNA, 503 bp, Homo sapiens
  misc_feature (1)...(503): n=a,t,g or c
cttctctgaaatgggtaaaggacaaattgtgtaaaaaaacctatgcactatagaagggaatagtaaccatttcttttgtctctctgtttctgttctgactgagaacctgcagccatttcttgttacatgaaaacaaaatgctacttgttacctctattttttgttactatacaattatgaaatgtaatgtaagacaccaacagaaatgatatacctgtaactgtacctatcaggactatacctcatttacagtcagaaagcttactgggatgtcaggaaatgatacagggttggttctcatttcgtgccgaaatgagacaggaaattcagtgacgaaggtgcgttgtaggggtattgatgtgccccgggtagtgccagcagagtagggggaaactgcttttgcttaaaaantactctttgacatggttgtttcnttttacaaaaaatttcctttntttaccccgggcctcaccccggccctgtgtggttgggnttttgtgggg

SEQ ID NO: 798 - DNA, 336 bp, Homo sapiens
ctaaaactcagcagttcataggggtagagggaaataacctgagaaagccgagttaaatcttaaaatttttactataaggatagagatgatacaagtgaactctgcaaaatagttttgtgaaattaaacaaaaaaatctactcttaatgtatattatttcatatttgtttaacaaaagcagcttgatgcctttgttctggattatacattaagaacaagcattattttaattatgtagtaacatttactatgactttgaagccagatttcaaaaatctggctttgtttaaattaattgggaaacactcttctatttaagttaggtatttaaaaaaag

SEQ ID NO: 799 - DNA, 370 bp, Homo sapiens
  misc_feature (1)...(370): n=a,t,g or c
ccatttaaacttgcagagtgcaaacttgcaataattcattgtgccggttattcagaccctatattggtgcagacactttggcaagatatcatagagaaagaattgagtgacagtgtgacattgagctcctcggatagaatgcatgctcttagtctcaagattgttctccttggcaaaatttatgctggcacaccacgcttctttcctttagattttattgtacagtttttagaacagcaggtttgtactttgaactgggatgtgggcttcgtaatacagacaatgaatgaaattggagtaccattgcctagactactagaagtttatgatcagttgttcaaatcacgggatccattctgggancagaatg

SEQ ID NO: 800 - DNA, 463 bp, Homo sapiens
  misc_feature (1)...(463): n=a,t,g or c
natttcggcacgngtccggccaactctagaatctttttaagcaggtcagccaggtatttgcaacttccacaggatgaattgcttgccaagtttctggcactcttgtctggttggaagagtacatccaaagggtacttagtgatcctttgctaagaagttttttgctgtttccgggttacagatttggccatatatttctaaacagcccctgtaaagttgaaagaaaaagtttataacagtgaacttctgaggtttagttactgcaggctttgttgagaagagattgttacagtgtgatttatgggatgatcagggatgactttcccctaggcaaatatttgggatgcctcctgtttgtccaaataggaatgaatgggtgatgggtgatggggaggggatagtttaaacgtttttctctggntagggtttaacttcttaacaggtataatttacatggcccgga

SEQ ID NO: 801 - DNA, 1903 bp, Homo sapiens
gaattccagcaaatcttcagttggtggtaacacccttaccatgagccagatatgagatccctaatattctgtgatccctgatgagtgaagggaacaaggatatgtgtaggaggggagctcggtatgactaagggtcaagagaaggtgaggccagagagagcctgagctgagatctgctgaaacagctcctaaaatgaaaacaaggttggggccagaattttttctggatagtagttatgttttcctgccaacgctcaagtcctacacaaagacaaatgacaatcaatgtaaatgtcaaataagatcgttagcctgagtaatcataaccaatctgtatgacacctttttaacaggaggcctcattcttcttttccccaaccagaattaagagaaaaaaagtgaatatggtttttgctcacagaatggataacagcaagccacatttgattattcctacacttctggtgcccctccaaaaccgcagctgcactgaaacagccacacctctgccaagccaatacctgatggaattaagtgaggagcacagttggatgagcaaccaaacagaccttcactatgtgctgaaacccggggaagtggccacagccagcatcttctttgggattctgtggttgttttctatcttcggcaattccctggtttgtttggtcatccataggagtaggaggactcagtctaccaccaactactttgtggtctccatggcatgtgctgaccttctcatcagcgttgccagcacgcctttcgtcctgctccagttcaccactggaaggtggacgctgggtagtgcaacgtgcaaggttgtgcgatattttcaatatctcactccaggtgtccagatctacgttctcctctccatctgcatagaccggttctacaccatcgtctatcctctgagcttcaaggtgtccagagaaaaagccaagaaaatgattgcggcatcgtggatctttgatgcaggctttgtgacccctgtgctctttttctatggctccaactgggacagtcattgtaactatttcctcccctcctcttgggaaggcactgcctacactgtcatccacttcttggtgggctttgtgattccatctgtcctcataattttattttaccaaaaggtcataaaatatatttggagaataggcacagatggccgaacggtgaggaggacaatgaacattgtccctcggacaaaagtgaaaactatcaagatgttcctcattttaaatctgttgtttttgctctcctggctgccttttcatgtagctcagctatggcacccccatgaacaagactataagaaaagttcccttgttttcacagctatcacatggatatcctttagttcttcagcctctaaacctactctgtattcaatttataatgccaattttcggagagggatgaaagagactttttgcatgtcctctatgaaatgttaccgaagcaatgcctatactatcacaacaagttcaaggatggccaaaaaaaactacgttggcatttcagaaatcccttccatggccaaaactattaccaaagactcgatctatgactcatttgacagagaagccaaggaaaaaaagcttgcttggcccattaactcaaatccaccaaatacttttgtctaagttctcattctttcaattgttatgcaccagagattaaaaagctttaactataaaaacagaagctatttacatatttgttttcactcaactttccaagggaaatgttttattttgtaaaatgcattcatttgtttactgtagtttttgtgggttttattttacttgctttttatgttttaggaaaagcgttcactttgaactttagccaacagtccttttactattaatatattagttacatgcataaaaaa

SEQ ID NO: 802 - DNA, 5181 bp, Homo sapiens
ctgcagcggtccctctgggctgatcttccactctgaccttcagtaagtcctaaaactttccccggagtggccaggagataattcgccacattctgcaaacgtttccagggaagagcctcttaacctttgggggaagaacttgcggacaaagttacaaacgaacgcagtctatctcccgcgccatgaacggaatgatggctgtaactggtcatctaaagtcattaatggtctgcgaacaaattcttcctctctgtttcatctttgaataacttcgccacacaccaaccctcagtgctgcgaaagtcatggtgtttatttagatatcgactgagtacttataaaacttaaactttccaatgtaaaagtgaactccttggtaaggactcctggctgcatcaacaaagcaatgtgatgcctgattaatagtgctgattaatgttggctcaggttaatgctcagcctattacagtaattaaattgttcacccatatatcaaacaagagttaatgaaaaataatttatttagaacgtcgaggctttctcatagattgttcaaagacctatgatagcctttatgggtcacttgtaagagtaactggtggtagcagtcctcagcaacaaaaactcgattttaatagaggtctttagatggggaaacagtttatttctgaggctctgtgattgacagcggtagtaatgacacgtttcagaatgtgaaaagtacttggtcgataaaatgatatacacaaggggcagctgatggctgttcctacagaacgccattgaattttgattcttagttcttgtcaaggggtcattttaatcagaaagttaaacttttgggacaagctcccctctttgaaatagaagcattttaggaaatgcacaaataagtgaatgtgaattcaacaaactattaggatttttccactagccaaaatagctcgtttgagttggtgataaagataggtatatttaaaagagcatcatatcttaattatttccactatcttgtcacccgaaaagaaaactgaattgagcggaactttaatctcataaaaaaaattttcatctcaccagaaaggattaacaatatttaaggattttccaaaaacacatttttaaaaagtttatcttaaagtcatctatcattatagtttctattaataagcctcagtagaaatatgtatatgttatgtaatttaagtattttgagattactatgcaaagtgctgactagaatgttcctcctactgagaactatatagccccattatgaacgaacttctgtttttttttttttttttgaggcggagtttcgctcttgttgcccaggctggagtgcagtggcacgatctcggctcactgcaacctccgcatcccgggtccaagcgattctcctgcctcggcctcccgagtagctgggattacaggcgccgcctactaatttttttctatttttagtagagacggggtttcaccatgttggccaggctggtcgaactttttagtagtttctaggtgcaatttttgtgcgtgtatttgggttttcactaaaaatttcaatttcttctccgaattcaattattacgttctttattcccatgacatttgtcagatcgtctcattagagtggcttagtttaactgtcaagtctctagggcattcaatcgcagagaagtgagtaaaacgccagtctcacagcgtttttattaacagatggcggaaaacaaacgtctttggagtaaaaccgaagagaatgggttaaagggtcaataaacaattattatcgtgcttaaattggggggcttcgcatcagatccaatggggggccgctcgcccgatctggaggggctggacacccccaaccgaccccagagcgtcccccaggggccacctcagaggatggggtggttatcccccggctggaaggctcctacaggctgtcgaggggtcaaaccagagtgtcgcgggtgtgcttctgaggttagggtggaggactaattgaggaggctgggaagtctaactcgtgcagcggccctcggtgcagacagccgcgtaattcgggcatcagcctctttggcaagaaatagtgaggtcccctctcctccccactcttctcagctgctgcctccctcctacgggtgaattttctctcccgagaagggctgatttcctaggcttgctttccttccctcggcagcgctctgacgtgcacaccatgtgacaggcccccttctgctataagccgaggaaggtccgccctctcctggactcagccctggcctcgccgagctctgttcttagactctcacccgtcccgcacgttcctggtcgcctggcgttctgattcgcccgcccgggccccgccaccccctcctcagctgacggggcaaaagctgctccgagaggagaaggtcaagtcctccgcccgggccgggccgagcggagcccagggagcgcagcatccgcgcggctaccgcggcggcgcaggagttataaagtcggcgcgcgagactccgccgccacccggcagccccggcgcagctccggcagccgcagtcgcagcgcccccagcgtggcgccccccggccgggcctgccgcccgggacccgggctggggcgcagagggagcccggagcccggcgcccccatgcgccgccccgccgccgccgcgccacagctatgaccctgagcactgagatgtccgatgcctctggcctcgccgaggaaacagacatcgacgtggtgggggagggcgaggacgaagaagacgaggaagaggaggacgacgacgagggcggcggtggcgggccccggctggctgtccccgcgcagcggcggcggcggcggcgctcgtacgccggggaggacgagctggaggatctggaggaggaggaggacgacgatgacatcctgctggccccgcctgctgggggctccccggcgcccccgggcccggccccggcggcgggggcaggagccggtgggggcggcggcggcggcggcgcgggcggcggcgggagcgcgggtagcggcgccaagaacccgctggtgaagccgccctactcgtatatcgcgctcatcactatggccatcctgcagagccccaagaagcggctgacgctgagcgagatctgtgagttcatcagcggccgcttcccctactaccgggagaagttccccgcctggcagaacagcatccgccacaacctctcgctcaacgactgcttcgtcaagatcccccgcgagcccggcaacccgggcaagggcaactactggacgctggacccggagtccgccgacatgttcgacaacggcagcttcctgcgccggaggaagcgcttcaagcggcagccgctgctcccacccaacgccgcggccgccgagtctctgctgctgcgcggcgcgggagccgcagggggcgcgggcgacccggcagccgccgccgcgctcttcccgcccgcgcccccgccgcccccgcatgcctacggctacggcccctacggctgcggctacggcctgcagctgccgccttacgcgccgccctcggccctcttcgccgccgcagcggccgccgccgccgccgccgccttccacccgcactcgcccccgccgcccccgccaccgcacggcgcggccgccgagctggcccggaccgccttcggctaccggccgcacccgctcggcgccgccctacccggccccctgccggcctccgcggccaaggcgggcggcccgggcgcctcagcgctggcgcgctcgcccttctccatcgagagcatcatcgggggcagcttgggcccggccgccgctgccgccgccgccgcgcaggccgccgccgccgctcaggcctcgccctcgccctcgccggtggcggcgccgccagctcccggatccagcggaggaggctgcgcggcgcaggcggccgtgggcccggcggccgcgctcacccgatccctcgtggccgccgcggccgccgccgcctcctcagtctcctcgtccgccgccttggggactctgcaccaagggactgccctgtccagtgtcgagaactttactgctaggatttccaattgttaataacgctatgttagcgcgctcgaggaagaaggtaggaatcccggctccttttctcgtcttggtggttcggtgttttgttcgctcctccaggcgcggcccctctcgacctcgcgcgcccattttcgccgctgcgaattctcggacaaaactgtcaacagcccgggcgcgccttttggctctgcgggtccctctatttatgcaaagccgacctatgctacagccccccaacccccgacctggggtagggaggaagagggtgccggggaagggagtccgccctgtccaggcactagaggctcccttgacgtttggcagatgaaaaacaactaagcctttttgaggtgtagagattctcaggtccaggcgttaaaaaataatggtcaaaagaataatacaaaaatagtaaaggtcttgaagaatgccagcgaagcaattcttttttatttgaggacacttgtctggtgtactttttcatgaaaaggaaaaatggttaacatgtttacacaagaaaaaaagtcaaaattatcatttatttcaacctgtgttttgtatcataacagacgtgtggatttttttgtacttactgcgtattctttacaaggagtattgtaaattttactggcaattattattgtactattctaaatgtaagatttttacactttttcagaaataaaaatgcttaattttcaaagaaaattcaccaaaatgattggcttcagttgtccccttcttagtttttcttttctacttaaaaaaactttctatgtggggtaagcaggaactcaatatagaacagacttaaatactttcagagagaatttaagaacagcatcatgccatgatttttcacttgaacttcctaagtgaaaaccatggtaggagatcagaaattatttttaaatgactacaaataaaataagttactttggtatacattttcagatctgactctatgccattttaaagcgcattgaagtatgttaaaattaaagccacaggtacccaaagataattttataggaactttgcatttcatttttgagcttccttcctcatttaatttccactcagttcacgacaatattatatctgcag

SEQ ID NO: 803 - DNA, 2738 bp, Homo sapiens
ggcaactccatttccttggactttgagcccagtatagagtaccagtttgtggagcggttggaagagcgctacaaatgtgccttctgccactcggtgcttcacaacccccaccagacaggatgtgggcaccgcttctgccagcactgcatcctgtccctgagagaattaaacacagtgccaatctgccctgtagataaagaggtcatcaaatctcaggaggtttttaaagacaattgttgcaaaagagaagtcctcaacttatatgtatattgcagcaatgctcctggatgtaatgccaaggttattctgggccggtaccaggatcaccttcagcagtgcttatttcaacctgtgcagtgttctaatgagaagtgccgggagccagtcctacggaaagacctgaaagagcatttgagtgcgtcctgtcagtttcgaaaggaaaaatgcctttattgcaaaaaggatgtggtagtcatcaatctacagaatcatgaggaaaacttgtgtcctgaatacccagtattttgtcccaacaattgtgcgaagattattctaaaaactgaggtagatgaacacctggctgtatgtcctgaagctgagcaagactgtccttttaagcactatggctgtgctgtaacggataaacggaggaacctgcagcaacatgagcattcagccttacgggagcacatgcgtttggttttagaaaagaatgtccaattagaagaacagatttctgacttacacaagagcctagaacagaaagaaagtaaaatccagcagctagcagaaactataaagaaacttgaaaaggagttcaagcagtttgcacagttgtttggcaaaaatggaagcttcctcccaaacatccaggtttttgccagtcacattgacaagtcagcttggctagaagctcaagtgcatcaattattacaaatggttaaccagcaacaaaataaatttgacctgagacctttgatggaagcagttgatacagtgaaacagaaaattaccctgctagaaaacaatgatcaaagattagccgttttagaagaggaaactaacaaacatgatacccacattaatattcataaagcacagctgagtaaaaatgaagagcgatttaaactgctggagggtacttgctataatggaaagctcatttggaaggtgacagattacaagatgaagaagagagaggcggtggatgggcacacagtgtccatcttcagccagtccttctacaccagccgctgtggctaccggctctgtgctagagcatacctgaatggggatgggtcagggagggggtcacacctgtccctatactttgtggtcatgcgaggagagtttgactcactgttgcagtggccattcaggcagagggtgaccctgatgcttctggaccagagtggcaaaaagaacattatggagaccttcaaacctgaccccaatagcagcagctttaaaagacctgatggggagatgaacattgcatctggctgtccccgctttgtggctcattctgttttggagaatgccaagaacgcctacattaaagatgacactctgttcttgaaagtggccgtggacttaactgacctggaggatctctagtcactgttatggggtgataagaggacttcttggggccagaactggaggagagcacatttgattatcatattgacctggatttagactcaaagcacatttgtatttgcctttttccttaacgtttgaagtcagtttaaaacttctgaagtgctgtctttttacattttactctgtcccagtttgaaacttaaaactcttagaatattctcttattatttatatttttatatttcttgaaagatggtaagtttcttgaagtttttggggcgtttctcttttactggtgcttagcgcagtgtctcgggcactctaaatattgagtgttatggaggacacagaggtagcagaatcccagttgaaaatgttttgatattttattgtttggcctattgattctagacctggccttaagtctgcaaaagccatctttataaggtaggctgttccagttaagtagtgggtgatgtagttacaaagataatatgctcagtttggacctttttttcagttaaatgctaaatatatgaaaattactatacctctaagtattttcatgaaattcaccagcagtttgcaagcacagttttgcaaggctgcataagaactggtgaatggggtaagcattttcattcttcctgctgaagtaaagcagaaagtactgcatagtatatgagatatagccagctagctaaagttcagattttgttaggttcaaccctatgaaaaaaactattttcataggtcaaaaatggtaaaaaattagcagtttcataagattcaaccaaataaatatatatatacacacacacatacatatacacctatatatgtgtgtatacaaacagttcgaatgtattttggtgacagtaataaatcaatgtgaggatggatagaatttagtatatgatagagaaaatgtcataaatggataaaaggaatttacaacttgaggagaaaacctttacaatttcctatgggtgtcagaagtactctcagcgaaaactgatggctaaaacagtatctactattctctgataactttttttctgagacagagtttcattgtcacccaggctggagtacagtggcatgatctcagctcactgcaaactctgcctccc

SEQ ID NO: 804 - DNA, 1414 bp, Homo sapiens
gctcagttagggctcttgccactccccatactggcccccatggcttgtctaaataggaccttgtttcaacttttctacttactgtgaccagccaacaggtgacatatttgtacagcacaaacttgccccagatcagcatgtacatgcagcggaaccagaaggggtggttcttgagggaagaaagcacagtgcattagggatatcacatgactaggcagtttctctcagcactcttccttttcacacttgtggctggctacttcatacctgcctgagtcctgctgccagatgccctcaatagtctggcctgattgccttcacaataggcagagaggaataagcagagggcctggagaatattcattcgcctttcccttggagagcctcaagggcagcactgtatttaacttctctactgtttgccttcgttggcaaagtgtttggaatgagcatttggaatgttaagtacagaggggcccatattggattttaatttaaggagagaaacctgcccagaattactgaactgttttcaagcctttcagctgggcaggagcaaaagccagcacttccccccttcccttggtttctgaattccctagaagtgcccaaatgtatcagtcaagagaagaaaataggatggagaatcagaagctgctgtgctctgaggggtcacgtggatgtgataaggcaagctaggagcggctcctagagaaggcaacgggtgctaaatgtgcacctggcacagccctgtgcccgcgaaggttgttcagtgctggctgatgaacatgtcccagcacggctggcattgacaactcacagatctagagcaaaaccaacatgcacttgtagatgatatttcctacttctctgctatctgtagggatccttgcctgtccattttctagctctggtgcagtcatgctgctgctgctttagtagacactcacgtcatagtcttcagtgaggagatagtcttctgtgatgtgggggctgagcagtgtgtagcccactaggtagaaaaggcccagactcaggcgcttgagagcaggaatgatgctggaaaggaacgagtgaagttcctggtcacagagagcagagactattcccttcaccctctgaccttcagttatggagaggagtgtttaggggtgtggttgtctacctggaatgggatgagaagctctgctgcccaaagtgtttcctgtttcagggaaagatttctatggctggctatgaggaatggggactgcaaacctcttaagagttgtaggaaagtcagggcagcagacagtggaccagtcttgtgtttacccctcagggatgctactgatctcaaggtcttgccaggtctcacaatctccattgggactgaaaacccagtggaggtaagataataaaaataaccactttg

SEQ ID NO: 805 - DNA, 475 bp, Homo sapiens
  misc_feature (1)...(475): n=a,t,g or c
gagaaaatgaggttaatgaagaggtatcagttaaatatccccttcttctcaccctgccaaaattagcagttggatttttggaaactctggaatattctgggtcattttgttttgtatgtttgttgtttttccgtcttccaaaggtgaaagctatgatacagttccacttaaattttagtgttttcttactcagctcaagcattaatttttgattaagtcttaatctgcatgacctgtgaatctgaatccatcatctccctttcctgccagcttttctacaaacattgaaatatgttatttggtcagcacttatttcctaggttcacagccttgggaggttgtggcatgtcctcccagtctggctgggaagagaccaagctgtaccatccaaatgcttccctgggtcttgatgatctcttccagagtcgatctgaagtgggccttttctgganccttccccttctttccccttgga

SEQ ID NO: 806 - DNA, 551 bp, Homo sapiens
  misc_feature (1)...(551): n=a,t,g or c
ctagcagcaagggccatagctgtgcagaaaggaagcattggaaacttgataagcttcctagaggatggggtcacgatggcccagtaccagcagagccagcacaacctcatgcacatgcagcccccgcccctggaaccacctagcgtagacatgatgtgcagggcggccaaggctttgctagccatggccagagtggacgaaaaccgctcggaattccttttgcacgagggccggttgctggatatctcgatatcagctgtcctgaactctctggttgcatctgtcatctgtgatgtactgtttcagattgggcagttatgacataagtgagaaggcaaccatgtgtgagtgaagattagagggtcacatataactggctgtttctgtcttgtttatccagcgtaggaagaaggaaaagaaaactttgctcctctgcccatnactattncaattgggaattaaaganataattaatttgacagttatgaattaatattntgctgtgtgataagtcaccttgggttttttcccttttttaccaagttntgcta

SEQ ID NO: 807 - DNA, 415 bp, Homo sapiens
  misc_feature (1)...(415): n=a,t,g or c
tatttattaaaaacaaaataatgcaagttctgttaaagtaacaatatatacaccaagataaatatttggaattgtggaaacagaaatagtaaaaatttcaaattttttctcaatatcttaatgacttaaataatttagcttttttcaggcattttttgttaaaaataaacttacttaattttcaacttaggtcaatgtgcttttttgctttttttaaagacaaaaattagtaaaaatggcaggtactaggtttgcactagctaaaaaaataatgtttacagttgtctacgatgtaacaattttaaaaacatacaaattcagtatgtagtatgnaaattccattaaaaaaaaccccataaggaacctatgcccccataaaaaatataaatgccacctcccattaattatatggaat

SEQ ID NO: 808 - DNA, 910 bp, Homo sapiens
  misc_feature (1)...(910): n=a,t,g or c
gnnnnnnnnnnnnnnngnnnnntggcttnatcatangggnantacttcatcttctctgcataaaaattgtggcacacaatgcttattcactagtgtgtcccacccgccagccccacagatgactggaggaaggaggggaaatgtgtagaaagaggcttcgccaccacttgttcccacgagaatatgtcacttgcccagataaaactgggcggcagccagagttccctgaagtgggaagtcagagctccatgcacacagtgtcttcagaaggtgaaaataaatatttccctgtgctccttttactcaacccctggggtatctaatcttgccaggtcttggccagttgagattctgttccacctgcctgcctggccctttcctccattaccacccagactgctcgcctcctggggattctcaggggctccattatggnttgatttactccacgtgcagaagtcttggagtggacctaggaggtagggtgggatatttnnnnncaattagggatacaggtcatgncaacccatccnangtgagtagattcaagtttggntttacangtngattganaaannngggnntnnncnngnttnantgcnaaannnnnnnnnnccagnnnnntnnnaaannnnnnnnnnnnnnnnnnnnnnnaannnnnnnnnnnnnnnnnnnnnnannnnnnnnnnnnnnnnnnnnnnnnnnnnnnnnnnnnnnnnnnnnnnnnnnnnnnnnnnnnnnnnnnnnnnnnnnnnnnnnnnnnnnnnnnnnnnnnnnnnnnnnnnnnnnnnnnnnnnnnnnnnnnnnnnnnnnnnnnnnnnnnnnnnnnnnnnnnnnnnnnnnnnnnnnnnnnnnnnnnnnnnnnnnnnnnnnnnnnnnnnnnnnnnnnnnnnnnnnnnnnnnnnnnnnc

SEQ ID NO: 809 - DNA, 487 bp, Homo sapiens
gcaaattcatcaaaaccatcaaattgccaaaacaaagaatcagctagcaaacagtcttaggaatcgtgcagggggagaaatccttgagccagggctgccatataacctgacaggaacatgctactgaagtttattttaccattgactgctgccctcaatctagaacgctacacaagaaatatttgttttactcagcaggtgtgccttaacctccctattcagaaagctccacatcaataaacatgacactctgaagtgaaagtagccacgagaattgtgctacttatactggttcataatctggaggcaaggttcgacctgcagccgccccgtcagcctgtgctaggcatgggtgtcttcacaggaggcaaatccagagcctggctgtggggaaagtgaccactctgccctgaccccgatcagttaaggagctgtgcaataaccttcctagtacctgagtgagtgtgtaacttattggggttggcga

SEQ ID NO: 810 - DNA, 499 bp, Homo sapiens
  misc_feature (1)...(499): n=a,t,g or c
gaattagagcgctcatttttgtcagaaccatcatctccaggaagaaccaagactactaaaggattcaaacttgggaagcacaagcatgagacctttataacgtcaaggaaactacagtcgtcgggaaggaacaagaggctccagttggagtgctcagaatactcctcgaggaaattacaatgaaagtcgtggaggccagagcaattttaacagaggccctcttccaccattacgaccccttagttctacaggttaccgcccaagtcctcgggccgtgcttctagaggtcgtgggggacttggaccttcctgggctagtgcaaatagcggcagtggaggctcaagaggaaagtttgttagtggaggcagtggtagaggtcgtcatgtacgctcctttacacgataaaaatcctttcgggaacatcttaactgtatatgaacatttcacgaggacaataaaaatgagacattgaaggnccaatttagacttagcagtttaa

SEQ ID NO: 811 - DNA, 452 bp, Homo sapiens
aaaaatgatgattttgcaagacctagattttggcttggtttcttgcctccttttttggcagccttcatcttctcatctcccaaaccccctgagcccgtagttcttcatagtggacaaagaacttgtggtcttttaaaactgggactgatacttttttgagagagtatcgtgtcgaaagtgtgatgttctaccactttaccaataactaattttaaatacacattgtcctctcgatttttggaccaaacagacgctcacagtggacggcttatcaacgggttgcattggggaagaagcctctccctctctgtcagcaccagctggtaaaggtgactgtacagatgtgcattttccttttggtataaatggtccacagcactaactggtaaggcttattgtacagtatattgtcagtattcttctggttcagcataccttatagttcatatata

SEQ ID NO: 812 - DNA, 1614 bp, Homo sapiens
gaattcgggatcagggcaagcattgtggagcggttccttatgccaggctgccatgtgagatgatccaagaccaaaacaaggccctagactgcagtaaaacccagaactcaagtagggcagaaggtggaaggctcatatggatagaaggcccaaagtataagacagatggtttgagacttgagacccgaggactaagatggaaagcccatgttccaagatagatagaagcctcaggcctgaaaccaacaaaagcctcaagagccaagaaaacagagggtggcctgaattggaccgaaggcctgagttggatggaagtctcaaggcttgagttagaagtcttaagacctgggacaggacacatggaaggcctaagaactgagacttgtgacacaaggccaacgacctaagattagcccagggttgtagctggaagacctacaacccaaggatggaaggcccctgtcacaaagcctacctagatggatagaggacccaagcgaaaaaggtatctcaagactaacggccggaatctggaggcccatgacccagaacccaggaaggatagaagcttgaagacctggggaaatcccaagatgagaaccctaaaccctacctcttttctattgtttacacttcttactcttagatatttccagttctcctgtttatctttaagcctgattcttttgagatgtactttttgatgttgccggttacctttagattgacagtattatgcctgggccagtcttgagccagctttaaatcacagcttttacctatttgttaggctatagtgttttgtaaacttctgtttctattcacatcttctccacttgagagagacaccaaaatccagtcagtatctaatctggcttttgttaacttccctcaggagcagacattcatataggtgatactgtatttcagtcctttcttttgaccccagaagccctagactgagaagataaaatggtcaggttgttggggaaaaaaaagtgccaggctctctagagaaaaatgtgaagagatgctccaggccaatgagaagaattagacaagaaatacacagatgtgccagacttctgagaagcacctgccagcaacagcttccttctttgagcttaggtgagcaggattctggggtttgggatttctagtgatggttatggaaagggtgactgtgcctgggacaaagcgaggtcccaaggggacagcctgaactccctgctcatagtagtggccaaataatttggtggactgtgccaacgctactcctgggtttaatacccatctctaggcttaaagatgagagaacctgggactgttgagcatgtttaatactttccttgatttttttcttcctgtttatctgggaagttgatttaaatgactgataatgtgtatgaaagcactgtaaaacataagagaaaaaccaattagtgtattggcaatcatgcagttaacatttgaaagtgcagtgtaaatttgaagcattatgtaaatcaggggtccacagtttttctgtaaggggtcaaatcataaatactttagactctgggccatatggtttctgttacatatttgttaggctatagtgtcttgcccgaattc

SEQ ID NO: 813 - DNA, 1445 bp, Homo sapiens
ctgccccacacacactaacccaaccatcttggggtggactccctgccagcccaactgttgtattttcagttcttccagtgtgaatcagttaatattctcgggaacgagggagaggttgatcctatgaggaaatcaaccacagtgaaaaggcttgggccgcttttgttttcgcctccttttgttgaacaaatttgatttccggagtcagtcattttactgtcaagacatttcttcggcattctgcaacagtttccaacatggctagatccatcagaaactgaagccgtggagaacgctctcggggcctttgccacttcttggagtagaagccgacagagagctgtttggaaacttctccttcacacaccagttgaagactaggctttggaggttttcaaagcagacggtgcttggatgggcagggagaagtaacattctgcaaatcgccgtcagaggtcctgaggacacagacctacctggcttgcattccccttgctgaatggcgtgtgctgcagctgcccactgagggctcttttccctgggattctggacttcagagtaggacagcaggctgggaagatgctgagttccatcaagtgcgtgttggtgggcgactctgctgtggggaaaacctctctgttggtgcgcttcacctccgagaccttcccggaggcctacaagcccacagtgtacgagaacacaggggtggacgtcttcatggatggcatccagatcagcctgggcctctgggacacagccggcaatgacgccttcagaagcatccggcccctgtcctaccagcaggcagacgtggtgctgatgtgctactctgtggccaaccataactcattcctgaacttgaagaacaagtggattggtgaaattaggagcaacttgccctgtacccctgtgctggtggtggccacccagactgaccagcgggagatggggccccacagggcctcctgcgtcaatgccatggaagggaagaaactggcccaggatgtcagagccaagggctacctggagtgctcagcccttagcaatcggggagtacagcaggtgtttgagtgcgccgtccgaactgccgtcaaccaggccaggagacgaaacagaaggaggctcttctccatcaatgagtgcaagatcttctaaaccccaagagacttcacacaacacttatgtatgcaccccaaagactaatggggagagggagggccgggaagccaggaaagcttggtgttttctctgggtacaccccaagcagcgtctccgttttggatacagttattgatgaggcttggccactggatgttttcactaactacactctacaagtgaactccttgcccaggccagttagaaaatcccttggggaactgtgatgaatattccatctttgattaaaaaagtgaaatagtctccataaaaaaaaaaaaaaaaaa

SEQ ID NO: 814 - DNA, 549 bp, Homo sapiens
  misc_feature (1)...(549): n=a,t,g or c
aaaataaaaataaagcggactttatttagaagataaaggtggtggttatcggttttggttaatcgagttgggctcaagtgttttacaggtcttaaatgccatcacagactggcatgccaaggnatttctgaatgccaattacagattgaagttgtttcaaaaaccaagatgctatcaaaagctgatgagtttggatttttcttaaagttggactaacacacttcttaaatatttgtaagagtaaatagattgcttggttctgaaagttaaaacactacactgagcaattccccttctccacaagtccctaaggcaatattacagttgcctctgacagcaagtccaacatttcaacaaagggggggtgaggagaactgggaaaaatgaaaagcaaaattaataaatgtaattgatacaggcagctgccacttgtgaanaccaaagcctagtccgatgcccattatcttcacatttgcactggacatcttcccaagcagacggtaactacattcttgaaggaatgtgccaagactagggtggggaaaggcc

SEQ ID NO: 815 - DNA, 466 bp, Homo sapiens
  misc_feature (1)...(466): n=a,t,g or c
tttttttttagggaagaaacaatcttatttattaatggcctgcatatttagaaagggtttaaaaacacatacatttcctgggacacaaacttacttaccaaatgtatgtccttacaaaataacttcacagatcaatagtcttgaacttacacaaagacatatatatgacatacattaggttaatatacatttcaaatgtttttgcagcaactttctaccagaaagtacactaatgtgagaatgtatgttctctttaaccccttaaaaatagtaataaaaaattacaaaataatgtaaatgtaaaattaaggcttgagactacatattcnagtattaataaagtcaaacaaacaatagttataaaacttggtgctgctgaatattttatatatatatatttatntatatatatatatatatacgcncacacacacacacgggataagtccttngagatttgaaatgc

SEQ ID NO: 816 - DNA, 572 bp, Homo sapiens
  misc_feature (1)...(572): n=a,t,g or c
ttttttttgaaggaagaggaaacacatttaatactggtactgttttcaataacaaattaaaccagtgattctgaatccttcctgcacattcaaattacctggagaactttaaaaaaaatactgatgaccaggtcttgtctcaaattacatgaaaatgggaatcaagattcaggcatggatatttttaaaaactctccaaatgattctaaaatgcagtcagggttgagagcaactgattgaaacctacatatttcttactgttccttgactgagaagaatgtcctataaatatagaaatagaactttttcctttacaggttgggcatacaagggtatctccagttagcagtaacttatggaggggtaagtcaagttattaatttatacttcatttccattaaaatatctacttatacctctcttcattcccgtaattctgtactctcaaactccaagaccaagaagagtcgaactacacttttataataaatttgttacactgaaaatncttattcattcatgcatgtaagtatttactgaatggcctactatggtgcaggccnggtgttaag

SEQ ID NO: 817 - DNA, 376 bp, Homo sapiens
tttttacatttactgatggaaaggtgaaatggtagatcgaagccagacattaaaactgttttaaattctcacttacttggacatagaatatcagcagtctcaaagtcattcacccggcagataggcaaaaatgagtcccttgaagatgaagtacaaaaagactattgaaaagtattttgcacattaaatgctaagctataggatataaacatcttattttcagaaagagatttctggatatatttcttaaggtcagtggacgaagccagaattctactataatgtataaccctatagcactgaaatctattttttcctgtatattaatcatgtagtcatgcaatactaaagtatagttacagattctaataaatag

SEQ ID NO: 818 - DNA, 545 bp, Homo sapiens
  misc_feature (1)...(545): n=a,t,g or c
actgttgacctgtcactgtttattatttcagcactaaaactgaggagcctcaactgctggctcttcttccctttgtatttgtgtaaggagcactgcactcccataaaaggttttaaaatacaaaatgtacaagaacacacaattccaagtgctgtaaacataactgagaaccagttcctttactaaacatccattttataaaatacaaggtttcaatttgagcccatctgagccttaaagatccattctgaataccaaaaacagggcttcacagccaggcccagaagaggtctggtgataatggctggccctgggtggggatagtttacacccgggcagcagcaccacacatgaacccaaagacatgttctttttaaagctgttttcagccatgtttctctggtgcatctccagtaagcagaaggctacccattccattcctcaaccccaagagctagcacagttagagtaggaggggggtgcgtactagcacgtgnccagttgctcagtgcggcaggtagaaatgatttgcataggtccatggg

SEQ ID NO: 819 - DNA, 830 bp, Homo sapiens
  misc_feature (1)...(830): n=a,t,g or c
ttttttttaaatgcaagtaaaaaaaagtttaatcacacagcactttatacagatatcgtaagcagtaggcattcacatctccacatgtacaatgcactgggaagcacagccccaccagtcactccgggtgtttctcaaacaagataccgactcggttccaaatgccacggtgtgtggtccggctccatcctcccgcagctctgctggctgggcggtcacagcacagcacaggtgtggagcccacttaaggctgacaagacgcatcatgctttggctttttttttgtctttttttctaataagagttaatatctttgcttttgagttttttttccaaccttaaatattacatacatacaccaaaaattacatagctgcaatgtgctcaacagcatcctctcggcctggagcttcacattatcaaaagcttagaaaacttgtaaacctctgggcctgtctctgggcactaggagagcccccgccggccgtccccttcggattgagcctgcagtttgtaagcgaagggctgacagtaggccttctagtccaagagagggctggctcgcttggagttcagtgagctgcacgccgtcccagtgtgaccatgtgatgggggaggggcccagcacttggccctggccttgtgcagctgctcttggcccccagcagccttccgacagaagagcaaggcacctatagctgttgcttccctgcagctccnggtcctcaaatccatgtgcagtgtgaaggccacaactctcctggggtcancggaaaccagctggtnccaacnctctagagggcaattcaaaggcntaggntaaaagggtc

SEQ ID NO: 820 - DNA, 263 bp, Homo sapiens
tttttttttagacaaatgctcactttaatcacaattctaaattaattattttcacattaatatagatatttccataaaccaagaaaaactgagttattatacattttttaacagctaacatgatttgaaaattttttattaaaaattgatcagaagctagttgaaattctcaatgtaaatataaaatattcattacaattgtttttcaaagtaaattcagatctaagcttcctgaaaagctgtactatctcatatcataatag

SEQ ID NO: 821 - DNA, 388 bp, Homo sapiens
aatttcctgcaataagtagtcatttaattaaagaacaaaattaacaggaatcaaaatgttgcagctgtattttttgttagacattatataaaaaaggaaaagtataatacagtaaatcatcttgtataacatgaacttaaagagttttcaaattaattatgatcaggataaaaatgtcttttgaacataatactgaatgacactgtcacatgtccctcatgtcagaggcctgggagtggtgagcctgcacatgcacgttgcccgtcctccattacactgcagaactgtaaaacaaggttgaaaggcaaacaacagttttcttctgatagagttatgttgggtcttaactgaccccaacagttcacactcctcagacaccaaagaagga

SEQ ID NO: 822 - DNA, 454 bp, Homo sapiens
tcaagttttcataaaaatccataattattgaaacccaagttacagagaaagttcgtaacttttttattgaattattgactctgccgcgtgtcggttcgtcggctttcaactccagtctgtcaatgcccctgtgtaggtggggtccccaggtctgggcttctgaggtcccggtagaaggagggcaggtggtgagggctggcggggggcagcaggggacggaggcgggagggagaaagagaacgtgtgtagaagggtagggaggaggtgggaaggactggagagtgagcaggtggcggccaggccccttcccctgcccggccgcccaggggtccctgccccccgccccggcctcatatcatcttcatgttgaacttgcggggcgcgtcggcggactgatgcctgcgtccgactttcggggcacatactcgatctcgatgttgtgctttgtgttgcc

SEQ ID NO: 823 - DNA, 217 bp, Homo sapiens
tcaaaataacataaatcttttattgaaagtcactttactaatgttacaatgggagtaacatagaaaaccatggtatcttattagcttccgaagtgaatactaataaaactgtgccagaaatttgaaccttaagttacagtgacctttaaaaacatcaagattttgtttacctacaatgtaagaacaattttataacttgaacagccataaaacaaat

SEQ ID NO: 824 - DNA, 228 bp, Homo sapiens
  misc_feature (1)...(228): n=a,t,g or c
ggaatggtagatgctcatttatgtaaaatcataataaatgttacacaaactgttagaataaaaaaataccttttttggggtggaggaggtccccagcctgctgctgggtagtgagagggggttagcaccattagggcgcagggggcgggactccgcancagcccgtggtgggcactgaggtctgtcggtcggtctgtgcatcctggcacagtcagcggcgggcaaccc

SEQ ID NO: 825 - DNA, 326 bp, Homo sapiens; identical to SEQ ID NO: 163

SEQ ID NO: 826 - DNA, 257 bp, Homo sapiens
attttctgaattatttattaacatttctcagatgttctaaagccctcccttgcctcctctctgccaaaccagggccctctgtcctacttcaaaagcccaagagctcacttaataaagcaagccccagtccccacctgggaagggcctggtcacatgggagggcaggtgagggtccctgagggacagcttgttgccctcactgttcctgagatgccccagcccaagaacgaaacaaaacttctcatcatttctcctca

SEQ ID NO: 827 - DNA, 326 bp, Homo sapiens
ttttttttttttttttgtgtaatggttttattgccctttaccaaggggagaaaaatacacattacagaaatagcagcaactttaattacaagcaaaggttgattttattcccacacccccaatgacttgttttggtttcagcaaataatttattaataaatgcatctagtaaacctcaaatagttatactgaatatttaaattcattggctaaaattatggcttaaacagttgatatgtgaaccaaacaccacaataaaaatgggtttttaaaaattaaggtatataacaaataaattaccaaattttctgtaaacctgccaaact

SEQ ID NO: 828 - DNA, 292 bp, Homo sapiens; identical to SEQ ID NO: 165

SEQ ID NO: 829 - DNA, 368 bp, Homo sapiens
gtgtgtaaagggtttttattggagagcctgtgcggctgaagtgccaccaaggatttggaaggtcactttcagcagccgccatttctgccaggaccagtggcaagcacctggcagatggagcccgggtgtttctgcgtaaggcagaggaatccagcttttccatgagattcagctgcagttgtcgaaaaccctgtgtgagccagcagttccagttcaaaggttgagggggcgaacagctgcgaggtggccaggctcccgtgagtcaccactcaggcctgagtacaccgtggagaggagagataaagcagccacggctgttcttgttgccagtcccacccctctggcaaacagatgggggaaaacagaga

SEQ ID NO: 830 - DNA, 403 bp, Homo sapiens
cttctaatttccatcatgcagccatttgcttccatccttctaagaattattaatgttctgtatatatacacccattgcaggcttgtattccacaataacaaagtcatgtatagagaatgtgaaatgatacttgaaaaccaagatatataaaatattgaagtcatttatgccttttgatgactgggttaaatatgcaaagcagctaaaggaatatctacaccacccacccccgtttttaactcacacaaagcatatgtagacagaaaaactgaacatactttaagagcacacgcttttttttcggctaagaatcacactatcatcgtagctttgcaactgatgtctgtggtaacatactggttataaaagacatgaaactcacaaaaggaaattagaacttagc

SEQ ID NO: 831 - DNA, 488 bp, Homo sapiens
ttttttttttaaaaaagggtcctatgtggaaatgagtgggacaatgataaaaataaacaaataattaaaattccaaatcaaaacataactcctggccctgagatccccagttaatcctctaagaccacaatctccacattgtgaacttgatgctggtgttcttccatctcagccacaactttctcctcagtcctcagctctgtctccaagatgactgctttgccctcagtatcttcagcttctgggtccggggctggatcaatctcaatgatggtctgcccatcctctgaggtgctttcaacagcctgaattgccgaggttaggccggactccatggccaccaattccacagggctaaccatggtggtcatgttgcccagtgtactcccatcctgcatggcagtagagctcagcagcgccaagctagatgaagggtggatggtcactgtgtctggtgagctgctcttggcagaggagaccactgtggc

SEQ ID NO: 832 - DNA, 406 bp, Homo sapiens
gctttctttctggtttaattccattcaacgcccccctcccccatagcacctggggggccgcagaacacccgcccgagtctgtaaaaagtcacagtttgaagagaatgagaggggcagtgtgggcctgcgtgggacgcctacgcagcggactgctcctcaggctcggcgttctcggccaggtgcagcttctggatagaattactgaggtcttccagattgctaagcagctggtccaggttacggtcagccattgtcttcttctgctcctctggcagcccctcagtgaccccatcctcttcctcttcatcgtcctcctcctccccacacacatccaggctgaagtgcagccgggctagcttctcctgcatctcccgaacgtgctccagctgctcaaaggagcattcct

SEQ ID NO: 833 - DNA, 308 bp, Homo sapiens
aatgacttttggtttttgtctttgtttttaatcatggtcccaaaggcagaaggcagtattttatctactaagtcacacagcttgtgagaggaaaggatgtctgtgtcaggcatgttaacttcaaacaaaatctgagatcggctttttccattgacattcttagcacagcacccaaagaagtataatctagccacagtgtcgtataatgaggcacggcttattgcagctggaaatcaattatcctcacgctgaggtggggattctagtgttcctttgactctgtggatactccccaaatggtgtctgtc

SEQ ID NO: 834 - DNA, 444 bp, Homo sapiens
ttttttttttttttttccttcaactttttttattatggaaaatttcaaacaaacacagtagagaaaatagtatcatgcaccccatgtacccttttcagtcagcttcaataattatcattgtatggataatcttttcatctctatacccatctagccccctatttctcaaattcttttgaagtacatctcaaaccttatattatttcgtatgatcatctctcacagttctgtgcagaatatattgttgggggatgggaatggaagcagagacggggggaagagaccattgcaacagtccaggaaggggaagatgacctgaaatatatggtggtaggagtgggaatgatgaggagtggtcaaattcaggtacacagtattttagatgtaaaactgacaggaactgctgatggattagatgtgggaggtgagggaaagtgagacata

SEQ ID NO: 835 - DNA, 241 bp, Homo sapiens
gaagatggctgacctcaaatcttatatcctaaatattaacgatatcccccaagttaatatacagaaaaacatgattctaaaataaatacacaggctttttaaaaaaaacttaattagggcctgtctagtgatgccctgggccggtgctgcactgctttagggaagcccctggctggtatctatgtttcctatagcacctctaggcactgggaaggagcctggaggagagctctggcttcta

SEQ ID NO: 836 - DNA, 318 bp, Homo sapiens
tttgtgtatcaacctctctttttattaagattttgaaatatgttggtatcacagatataaaacattctcatgttctttaaagagaattcacttttatgctagaaatgatggaaagggcttggtccatgacactttgctgagttattttgcttcatctgcatattactttgggaagaagatacaacatggtaaaataacagttttgaagaagaaaaaaataataatgactgttctaataacaagtcaagtttttcttttgtttggttggtttcagtcttttcatgggtttaaaaatataatgcagacttaatgtctttt

SEQ ID NO: 837 - DNA, 261 bp, Homo sapiens
ttttttttaatgggtcttgtgtgttttttattattcaggtttttaatcacagttctgttccaaggttatcttactataataagcagttatcttttgatcacccaattcctgaattcagtaagcaagttacaattcaaaaaggaagaagagtaaaaaccttttattgacagtgactttgccactgaattcaagggaatggaactagctgggaacccagttaaaaagaaaatatttgctcctggactacttttactgagatac

SEQ ID NO: 838 - DNA, 483 bp, Homo sapiens
cacaatatattgcaaaattttaataccatgtggttaaacacaatattcaaatattaaacttttcaagcacatgaaagtcaccttctgaaagacaaactgggctttttttataactacctttgtgtaactttataaaattacttccctcaacaatatctgacactgatcttgatactagttagaaagtctgatgtaagatgatgacatctcaacgtcagtgatttaggagattatcttcagaattcatcagaggaccaatcgtcatcttcatcccttacttctcggtatctccctgaagactccccttctggattataactccgcattttaatattcagtctttcagctaatttttgcgctgcgagctttgcttgcatctcctcataattctgtttctgctgtttctgaagtgccaaggattcttctatggagagcagctgcgtgggcatatggtgaagtggtagaagccgagctgctgtgatg

SEQ ID NO: 839 - DNA, 341 bp, Homo sapiens
ttttttttttttccagcataaacctatctgtgtttaataaaagaagggaagagaaaggccacacatacgctttcataagcacagaaaacttctggaaggctttgcgaaaaagagccgactggcagcttgcgcgaggcctttacccttcaacggactccagactcctgtactcttttttaaccataagcatgggttgcttttatgtattttttaaaattaatgttgttttaaacaactttgatttaaagatggtggggaaaagacctttggtcgttgtccctcaaacactcacaaaactataaggcgaaaaacaggaactcaaaccttggatactatgaggg

SEQ ID NO: 840 - DNA, 491 bp, Homo sapiens
cagtagatgttgtctgtatttattttctacctttatgaaacaagaacctgctaacaggtaaatcgtaaagtaacatatttttgccctgatgccattagtcacaatgccatggggtaactgctatgtgatttcccatttgcaaggaagcatattaattcagtttctgctcaatatacaattaggttgtagggatatagatatctcatttgagttatctgagtttttcatctttatatctaaaaatctaatctgaaaatagtaaaacacatttaaaaccttagatgctactgtagtaaaagttatgtttataaacatttcagtatattccttcaacttcaagaatcttgaatttccttgctagaaggcttttttcctcaaagattccttttaggcttactttggtgttcaggatctccaattataaatgtagtctctcagcaccacattccgtaaagatgatttcccaagtaacgggtattggactaagttgc

SEQ ID NO: 841 - DNA, 434 bp, Homo sapiens; identical to SEQ ID NO: 553

SEQ ID NO: 842 - DNA, 130 bp, Homo sapiens
ttatttattgcttgtaaaatagtcttcccttttattttaaatcaacccttttccaagttagtgccacgagttgagatcagggggtcagagcccactgggatgtggcaggggcagcagggggactcatgtc

SEQ ID NO: 843 - DNA, 261 bp, Homo sapiens
tttttcagaaaaatgtgttacttttaattttcaattatgtgagcatgcaacattgctaaatacaaaagtcatacaagctcacaaatgacttcagagactgccactcttgtaattaaagaacaatttagggtctattaagacatcataaatcatagatcctttcctattttcacttgatgactacacattttctccctactactactgctactacaggtttcacttagaagctttgctgcccggcagttacatttctttatc

SEQ ID NO: 844 - DNA, 284 bp, Homo sapiens; identical to SEQ ID NO: 558

SEQ ID NO: 845 - DNA, 442 bp, Homo sapiens
tttgtaacttaaaatacaaaagtcatttagtatacattattactccccattgtaattccagatttggtacagtatctttttcatttcctgacataaaccattaagacagcacaggctgtagtacttcattgtgaggtggctacaactctataatatgcacagtgattttaaaataggctttttgcatgccttgcatgaaaggtgctacatacaaacctgttttgtgaactctttggtaaccaccaatttaaaaatttggatgaaagcatttccacatggacagatctgaagcacattattggagctctgagccaaagctattaccctgtatattgattcttcagtttccttgaggggttaggtgttgatttagaatacagccagataatttaaagcatgtcaggccccggttaggaaaatgaaaatggctccgattcgtttc

SEQ ID NO: 846 - DNA, 364 bp, Homo sapiens
ttttttcaagagaatggattgtctaatttttaggagccaacaaatgctcattaatcaatgccccacggaagaacatgagaagacagtgttggcatttaaaacaataactgtggccattaccaggccccaggatggacagatagggacaaggacagggatacccagcatttctctgagagctggtgcaagaggattaatcctgaagggctcatttctgattctcctctgctggacaaagaatgactgagttggaacctcagagggtgcaagtcaaggtgccaagagtaagatgccagtttcggtctgtaagcaagtgtttctgggggtgagggaaggtcaggggaaacctgaccactggacagga

SEQ ID NO: 847 - DNA, 505 bp, Homo sapiens
ttttttttttttcatttggctttttgatgctgtgacttttattctaatacacacattgatttgattaaaccaagttcagggataaggcaaatatacattcttgttcccgaaaacatcccaggcagtttcagcgtctttcagcacagatgaggtagggttggggctgcaatgtcatgcctaacctgggcttcagatctggaactagttcatgtggaaaatgcaaatgaaacctctgaagcaatgctgtaaaaaacaagaacatttccatccgagccaagtgttctccaagacaatgtcttcttcctagggaaaaaggaaccaaagcttccttcttggcaaaatatccactgctgtccagaaatcgctcaggatggaacacttctgggtctctccagtacttttcatcaaagtgtacagaataaagatttgtaattactgttgtgcctttaggaatgggataaccacgtacaactgcatcttcagaggttgcatggaaaatccctaa

SEQ ID NO: 848 - DNA, 391 bp, Homo sapiens
caaatgacatagtgagagttatgatcggttacttgggttgtaaggattgaaaacatacctagatcatataaatttgtgaaggttttgccatcacaagcattatagggaataatgaacatcaactatcctacagctaaacctaatgaagaccaaattgcctccaaggtcaaaacaatatttctttgtgctcaaaagtggttcacataattgatgctgcattgatgctgtctatagagattctagttttctccacattttctctatttttcaatttcctttcttttcactggggtctattgttctttaacagaagtaatggccttttgtaaatatataattttcacgttgtaagcattctttccaagctagctgcccatcatcacgttttggc

SEQ ID NO: 849 - DNA, 389 bp, Homo sapiens
attttttgacaagtttattgaacagtattcaagacttcatctttataaacaaaaacctctgctgagtgatgccaaggcagtatttgctggcaatgttgtggccatattggcaacaagccattttgttgtgtttggtttctaaagtctggactactatagaactgccagtaaaacaatttaaatgtggcaattttgcaagggtggaaaataatttttaaagtgaccacttccagaaattctttccaaaagatttgactagcagcaattttacattttctttactcatttcccgagtgttcttaaaattgatgagattttacacttggcccatacctgtacacaaccacagactccagtaaaagggagctggaatttaaggctttcacgca

SEQ ID NO: 850 - DNA, 389 bp, Homo sapiens
tttaataatacactgattatatccactgggtttttttttttttaacagtatgaatttcctcttatagcaataatggatgagatttaaatgacagctttctcacattcattatggcatacagtgccccccaaccaagtcatcttggatgtgttgataaaagatttctcaatattcattatactcataagtactctcctctcatgcaaattctctaaaataacactagtgaaaatggtagctaatatttgtggtatgctacgttcaaggcaccaatctaagagcttttacatgtaataacttacataatacttccaagaatcttacaataaaggtaatatacttaggtctatcttaaaatgattaaaccaaggtagaggttaagtatcatg

SEQ ID NO: 851 - DNA, 266 bp, Homo sapiens
ttttaaatgccaacgttatatgttttatttttaatcaagtaatttttttaaacctcaacatatccataattgacagaataagacattaggcatgaaatgagaatataaaacccagagtgtacagaaaggcaaacagtgcttcagtccctccagatgactgcatgcgagtgaaacgcattccaaacatctaccccttttttgtcttttaaaaacatacagttcaagtgtttttattttcacttgtaaacaacatgagtcaaaatgga

SEQ ID NO: 852 - DNA, 403 bp, Homo sapiens
tatgtggacttcttttaaacatttattaaaaaagcaaaatgtatgttcatctcaaatctaacagttaaaaatggtaaagcaatacaaacaatgtgttactagcagcatccagtcgttagaatctctcaccctgcttctcggtctgatctgtgcaagctcagtctcttctgaccctgcagctacctccatccctcatcgtagtgcaggccaaaccaaattttataaaattaacaatttaaggttaaataagcttaaataagggtgttaaatacaagacacttcatcaaagcttctgtacaaagataaacaaatctggcattgtacaagtggttccgctggctcacagcacacagggaagttctagtgagtaagcagattcactctcatttctttccagcagagc

SEQ ID NO: 853 - DNA, 394 bp, Homo sapiens
tttttttttttttttttttttgccaaacatgacaaatttatttgaaagtgggcattgcaatgtagaatatggtgtcatagtaaactataggtgtattcagggaggtaaaggaagataaggggtttaaaaggaaaaacgaggaggattacgtaagttgttttgaaacaattatccttggctacaaagatcagtaacaaaggggatggccagtccaaggttggacaggcagttgctgcgcagggggcgtgggggcatttttttgtgtagttttgtggcctttgtgcaaggttgtggttttggcagtcttttgtgctaattctttatatcaggcaattattagtgagaactttcccatcacggctttccctgactccattctctgacagctttcaca

SEQ ID NO: 854 - DNA, 391 bp, Homo sapiens
acttttcaattttattgtataacttttcattaaagtgagaaagccattatattcataagacaaacacagtatcaaagaagttaaagtcattaggtaatgaaataacaatcatctcaaatttggatgcacatgctcaataactttttctctcagcctaaatgccttattgacagggaaaagttatatgagaggaaaacaaagtggcaagaaaactgcactggcccctcaggacaaaaactcatcagggaaagattcaaatgttttaaagttctgcaaaagcaatatgaaaaaccaaagtccagcattgggggcgggtaaaggtgggtttgtgaataggaagaaaggctggaagtttcagctcccttacagagtacctggaaaaaagacactg

SEQ ID NO: 855 - DNA, 372 bp, Homo sapiens
tttttttttttacctttttaaagtaacatttaaaattacttcctttaatataaaagaaacacacaagacacaaagaaagcccaataaagctgtgagtcccagtttggtagctgaggaggagtctaagaaaacaagccattcctcagtatccctgggaaagaaggggtgagaggacacagatatcaccaggccctgggtgactgcattgctggggccatgcagggcatagctctccaccaagggaaagtgctgattttccttgtcatggtcctggccttgctcccatgctcgtcctccagttttcagaagtcgtccagttccaagaatggctccttcctttagttcactaacattttcacttaggggtgaagg

SEQ ID NO: 856 - DNA, 510 bp, Homo sapiens
tttttactttaaatatatcttttaatgacttagtacactgttaggcttgtaagacagccttaaaaaatcataaaggggaacatgatcacatggcatgaaatgaacatttacatgctgttaaataacattttaaaatgtatgtatctatagccaataccatagaataccatatccaatatgaatagaaacagcacaattacttcaaaaaggaaatctgcatcaggctttagtgtgttgtcaaagtactttcggatattacctcatttgagagtaagaaaactgaggctcagaaaacaagtgacttgctaatgctgagggtcaaggtctttggaattcaaataccatgtgctttgcccattcctttttccttccattaaaccaatatcctcaaaatgccagttaaaaaaaaaaaatgtgtgtatatgaaacaaaatgaatgtaataaacaacattgaacaaagaaaaaactcaagcaatacgattaacataatcagtgctgaaaatgaatgg

SEQ ID NO: 857 - DNA, 430 bp, Homo sapiens
tttttgctcaccagcttgggctttactttagttcagtactgtttttatcagacccgtaactgctggctctacttagagtgacagttttgctgaagattcttacccccacctctcctgacatcctctaagctcttgcctggagccaagaggcctggtggtgaagtaaggatagggtgtggatcaggagattctcaactccttggcttctaggcactgtccagctgggaggcagaggggaacttgtactctgaagcctgtgactcctcttaagcctcacatctcttcaccactactctggtgccctggttatctgtcccacagcgagaggtattttatgtccataaagtgcccgtggtaagtgctcagaattcatctcttggctgtggcgggtgctgtcatttctcattccattgaggggaagaaactgagg

SEQ ID NO: 858 - DNA, 387 bp, Homo sapiens
ttttctctcacagcactccccacatttattatactacagatgcttttcagcttataatggggctacatcccaataaacccaacaaaagttgaaaataccgttaagtgaaaaatgcatttaatacacctaggctaccttaaacctactcagatcacttacattagcttacagttgggcaaactcatctaacacaaagcctattttataataaagtgttgaatgtctcatgtaatttattgaatactgtactgattgtatggatacttgaagtactgtttctaccgaatgtgtatagcttttgcacaatcctaaagttgaaaaactggaagtcaaaccatcattatgttcaggcccatctgtatttctgaccccctactagactagctc

SEQ ID NO: 859 - DNA, 377 bp, Homo sapiens
ttttttttttttttttttttttttttttttttgaggtgccagagtttggtttattggctcatccagtgccaaaggtccaatgggcaccctcttcccaaggaaccgggagccccgcggctcctgcatttctctttctccttcacgtgttcctcctggccctgactgaagccgtggcagaagctggggcgggtgtgagcagaggctgggttctgccaggggtcttagggcccagtctgcttggtacaggatggggaccctgggcaagaggggatggaccccaggggcagaggagaggggcccactcagcaggggcctgtaccagacagagcaggggtgggcctgaggagcacgggagtccagcccaggggcacggtggc

SEQ ID NO: 860 - DNA, 284 bp, Homo sapiens
accataatttctatgttttattttgactatctttaatgccaatccttcacaaatttgttacatacttctccgtagctcaagcagagattaacattttaaagtcatttaaagaataatcagcattataaataagtaatagaatgatattttacatttgtatagaaccttgaagtgtaaaatattccttttttttttttgagacagagtctcactctgtttcccaggctggagtgcagtagtgtgatcatggctcactgtagcctcgacctcccaggctcaggtga

SEQ ID NO: 861 - DNA, 327 bp, Homo sapiens
  misc_feature (1)...(327): n=a,t,g or c
ggtggcgagaaaatagtactgttaaggcaaatcttaccccgtagcagttaccagcaggacaggcaattttcagtgggcttttcagaagctggttgccatgacaaagagcacaatttattcctcagtcccttatcacagctacgntcacagaccataaaanttaacaccgctcttttccatctgatttcagagttcctcatccttacctgaggccttttgttcccccaattaaatggaatgaatgtcagtcatttagcaattcaattaatgctgattcaaaattccggccaaaaccagaatctataatcacancttcctaatcacagt

SEQ ID NO: 862 - DNA, 326 bp, Homo sapiens
  misc_feature (1)...(326): n=a,t,g or c
ggagagacagggtttccatatgtngcccaggctggtcttaaactcctaggctcaaacaaccctcccacctcagcctcccaaagtnctgggattccaggcatgagccaccaagtactagttgtctaccctagtgattgcncggcttactgggaactgcaactcactgttgctgcccagcttcgtgacagatactgtactgcatatcgccagcctgggaaaagatcaaaacccaatattcaaagtatagttttgactgaatgtgtgtccctttcataccatcgtaaagtgcataaattgtaagttgaagaccatctatatattattgt

SEQ ID NO: 863 - DNA, 152 bp, Homo sapiens
ttttttttttagggaggtccaaggttttttattcacttgttcatacaatcacattagaataaatgcatcatataaaagttcatgctgtcagtgctgtaaccattaagtaataatgtttcccactttttctgaatggcccaccagtataaata

SEQ ID NO: 864 - DNA, 450 bp, Homo sapiens; identical to SEQ ID NO: 581
  misc_feature (1)...(450): n=a,t,g or c

SEQ ID NO: 865 - DNA, 432 bp, Homo sapiens
  misc_feature (1)...(432): n=a,t,g or c
tttttttttttatcaattcaaattatatattttcatcttgtccctccaaaagaaaaaagaacaacgcatttttatcaagcaaaagataagtggcaataatacaaggaataacgaacatataatattttttcattaacaatccaaacactacaaaacatagaatatgcaatttaaaaatggaaatacaaattaatgaaaagttgggtacatgtcacattaggcaatgcaaaagaccagcttaagcatagtttctctaaattgacaattaataaaaggaaagttccctttctcaaatatggcacaaaaatatttcagtcacttctaggggaaaggttaattcaaaatgttccacttaattctnattattacagcctgtattactaatgggtttacggaacgtaggcggtcatcttggcttttaaatttnacaac

SEQ ID NO: 866 - DNA, 281 bp, Homo sapiens
ttttttttgttcatatgacatactttatttccaatctacaaccattaaaaacgctttataagtttacactgtacagttattctcatgtctgaaataagacacaggggcagggagagctggtggattggactgcagttgtcctagcacccgatccatcctaggaaggagccttttgaagacagaagtggaaaggagagaatagtggacaagagaggtggacagttggcccaaggatgcccttggtcccttccctcccatgggccttgcctgggggtccccca

SEQ ID NO: 867 - DNA, 428 bp, Homo sapiens
  misc_feature (1)...(428): n=a,t,g or c
tttcatnttngtttntttaatgagacaaaaacttgattcttagttcatagccatacaccaaaatgttcagcacaaatactcaagaaaaatgagatatccaccaaaagaacaagtcttattttctacttccatacttagattttcttcttaaaactttaaacagctcagcatggcaatagaagatgtctgctgaagtgggtccatattgttccaagtgtgcctgcaggtgtgtttacgtgtgtaaatgttttaccaatgtcctttatgggtgggtcccctgggtgattacttnactcccatgttgcttccagctaaatnagatttgaatagtattactgcattttaataggaagatataaaccncttttattctggaatactttggccattatgatagggaaaanggaataaataggggnttaaanggg

SEQ ID NO: 868 - DNA, 309 bp, Homo sapiens
  misc_feature (1)...(309): n=a,t,g or c
tttttttttatagagagagatctacttcagggctctttattttgttccattggtctatttgttcattcttgntcatcgaacattctggttcattctaacatacctgccttaatgactacagtacaacttgttcacattaacaaactcaaggagaaaaacatcatatcaatgagccaaaaaggcatctgactatatttagcagatatttctaataaaaaaaaagttaaacaagaactgagnacaactgaggctacaaaatctatttatctcagnacctagagtaaaacattacaccaagtaatttttcat

SEQ ID NO: 869 - DNA, 274 bp, Homo sapiens
  misc_feature (1)...(274): n=a,t,g or c
gctgtnaantannttatgatcaaaaagtttaataacacatggtatcgttgaaggcacaggaggaaaaaacagtctcttacagagcctgtaagattataaattagcaaacacacctttctctagagggaaatttggcaacatctacaaaaaatatttagatgcactttctatttctagganttataaaactactggctatatttagacaagtgcatagtgatatatatcacagattattctctacaggcaatgttttcaacagcaagaaactacc

SEQ ID NO: 870 - DNA, 435 bp, Homo sapiens
  misc_feature (1)...(435): n=a,t,g or c
ttttcgttttaatatttnttcactttatttgtgaaaaataaagccaaaatgccaacaacttccaagaaggaaccatttcatcatctccatcccctcagataaaacctcaattactggtaattgtacatttccatcaatatcccttttaaagaggtttattctgagganttactgagaccaggagctttaaaagctncaatttccctaatcactgagaggcaatcttgaacttctattgaacttggaaagcggtcaagactcactccataataagaagttaaggactgtcactacttaaggtggaaacctattcattngcagaaatagtcctctttctaccaagaggctaatgagcctcccctccccttcccctctctaaaataaaatcagtttggccttctaaaatcaaataacagttngccaacaaattagggt

SEQ ID NO: 871 - DNA, 507 bp, Homo sapiens
  misc_feature (1)...(507): n=a,t,g or c
caggattcattttttcgtgtttctctccaaatctgaagtttacaaaagtagccgagctgctcatcagggatatgcaagtctgctttctgcagcagagaacagaagtgaaagggagaagggatgagcaagaaagtctctggatttcaggagaaggaagacagccccaaggnagggagaaacacttgtgaagggtccattgaagagacagagagggggcagctctggcctctctgctgccacttccctcattcgatgcacagcggtggggctcacaccattttccactcagcctcttccgcacaacctgcacatctatcgtttcttcaggggctggagctggttccacgatgcctagccaaaatcaggagggggtcctgggggccagcgactaccactgtgaccagattattataaagatgggggaatgtggcttaaaaaagtgggggaaaggacccattttccaaatngcaattttttcttctattgcccccctcatttgcacctttt

SEQ ID NO: 872 - DNA, 253 bp, Homo sapiens
cccttctctagctgaaaaacttctacttaccttttaagaccctaacatgtccacacaataacagttttctatactcctcgccccagcagtttaatcccagtcatttatgcagacaaagtgtgctgctcactcttccactgtgagcatgcttatttcacatttgggttgaacaatcaaattcgtgctaacttaggaaaggggatttttcctctgggacattaataataacctcattcctccacacactaatcga

SEQ ID NO: 873 - DNA, 402 bp, Homo sapiens; identical to SEQ ID NO: 584
  misc_feature (1)...(402): n=a,t,g or c

SEQ ID NO: 874 - DNA, 468 bp, Homo sapiens
  misc_feature (1)...(468): n=a,t,g or c
tacggtaggtaataagatttactgaaaacgtctcggccacattcagtactggtttggtggatacatcagaaggaggttgcataacattaggcaggtggaggggctgagaggaagagatgtgggcacctgtgtgcagtgtgtccgtgctgggggacgcctgtccaggtggtgagtggaacgntgtgtgtgtgtgtctgtgtgcgcgtgttaacaagaaaaacgaaccagaaaaggaaatgcattttatcccactgcacattgcaaaagtctcacgccaaaaaagctagactttcctctatgtatggcatcaaaagggagtaaaaaatgattgggatcacccagattataaataaggttatttgtttctcaaaaatccttattaaaacattaaatatcagctctttttgggggagaatacattcatttcagggagacctcggaagagtgaccatccttttgctctacccg

SEQ ID NO: 875 - DNA, 440 bp, Homo sapiens
  misc_feature (1)...(440): n=a,t,g or c
tttgagaagcttaagaagattctgtggttctcacagagttagactttattagataaggggtttcggctaccctcaaagctctcaggactggggctagggtttaaggaaggcttatttaaatatgggaaataaaatacaaaagggccacacccgatgcaaaagactttgctggctttctggtcagacaagcctagagatgtgtattttcttagggcagtaaaacaaaacgttttcacaaggaggctaaatttctatcctgaagttcataaacatgtggcgctcggttaatggtaaaaatagacaatgtgtgaggcgggaccntcctcctcatcctcccaagctcctctcctacccacctcccttccctccaaggaaacgcaaagttgccccgaggaggtgggcctggctccanatcgnccccaggggtcaaggtatgtttc

SEQ ID NO: 876 - DNA, 264 bp, Homo sapiens
  misc_feature (1)...(264): n=a,t,g or c
ttatttattgtaagacatcatttttattaaatacactgtagtacaagagactttccatgtcaggttgagagaagctggtcacatgatttacaaacaaaacttttttttttttttaaacactgtattcacggtgtcactttgaaatcagccaagatgcagtgggtcntagtaaagcaatggacctcaaaacagattgcaaaacaagaactggtaagtattagcacagagacatcacattaaaacggaagatgagccaaatggaaa

SEQ ID NO: 877 - DNA, 384 bp, Homo sapiens
  misc_feature (1)...(384): n=a,t,g or c
tgtacaagggattttctacatagataatcatatcacctaaaaatacagacaattttatttcttcctttagtagtgcttttcatttcctcttcttaccttactgtgttggctaggacttctaggactatgctgaaaaggagtggtaggagcagacatccttgcctagacaagcgtgccattccctaggaagaaagcagtctctcacaatgaagtatgatgttagctatagatattttacgatacgttttttaatcaagttgaggaaatttccctctattcctagtaatctgagttattataagtgaattttgaattttattaagcaccttttctaaatcgatatgatcatatgaattttcntttttggctcgttaatatgggaag

SEQ ID NO: 878 - DNA, 338 bp, Homo sapiens
  misc_feature (1)...(338): n=a,t,g or c
tcattgataatgcttttattaaataccaactcgctgatgttaagatatgagcagatattaatgacttttccattctttatacaatttttctcaagtataaatgctttcctgtgcaataaggtatgagaattaattaaatgttttgtcacatttgtcacacttctgggagttttctccagtatgaattatcttatatacaatcaagtgtgacaaccgcttaaaggctttgtcacattcttcacatttctaggatttctcacccatatgatttcttttatgtctagaaaagtttggggtgttgtcaaaagcactggtcacatctttnaggtttggatggg

SEQ ID NO: 879 - DNA, 262 bp, Homo sapiens
cgtttctcttgattttattgatcttttaaaaaaataaaaggacatcttctgtggatacaggttaggatgtttctagggtaagaaacccaccatcgcagcgtaattctctgcggaatttcagtagcacttggaaagttctgttttcaacctgaaatttttgctgttcttccagaaaataacttagtaacaaaatgaaggccgtgaagctgcaggcacactccagaaattagtgtgttcttttaactcgtgtcccaaagagaca

SEQ ID NO: 880 - DNA, 439 bp, Homo sapiens
  misc_feature (1)...(439): n=a,t,g or c
ttctctttgcttagccagcttcatcagtggtgccctaatgcaaagactagaatactgctttctaactgctcactaaattacatcctaaaataaagtacatgtttattgtccaaaagcaccatgcactatcagtcctctagctataggcctctatcgtttctcgcttagctaaggaaaaaaaaatccttttaacttactaccaaagatcattcaaatcacagccaatagatccaaattaagaatgaatacattcagaatgtctgcctactgtcagtaccagtttttgttatgatggctgtcaagttttaaaatgtgacaatggggaatatattttctgaataaggttattcccctgaggtaaaccctttaggaaatccagccatcgctatggggcaatggnggttccaaatgatgaacgctcttcacacttgaaagggtg

SEQ ID NO: 881 - DNA, 329 bp, Homo sapiens
  misc_feature (1)...(329): n=a,t,g or c
accatgtaaagatttcagtttattccattaaaaaaaaaaaacacacaaaacacctactggaattacacttaacaatggcgccctctagtgggccactgcaaggaaataatcaccaataattgcttttagataagacttttgtgttagttccacttaataggtaatcaccattcagncagatactggnatgaacagcatggggctggncaggctggggagacaccaagtgagggaggggtaaataaggctgacatatgggccctggggggaaaaccaaacccagctacttcagggaggctgaggcaggaggnttggcctgagccccaggt

SEQ ID NO: 882 - DNA, 376 bp, Homo sapiens
  misc_feature (1)...(376): n=a,t,g or c
gtttaattgggggtgaaagggtgctgctgggactcaaggatacttttactgcagggtttccacaaaggcatcaaactcgcggacattcttctcatgcacagccagcttctctggtaatgagtccaagtcttcagccatgggactgtgcctccaatatctatggagaggctgctcagctgaggtgggttctgaaactcccgatagaaggtccccgggtccatcggaagaatgtcatctttaggaaaaagctgggtttaaagtctaatcataacaaagtcatcagggggtatttgcccactgcntgccccccnttgggagcccatntgaagttcaaggctttccccgggggnaaggnagaattcaagtttttgggggg

SEQ ID NO: 883 - DNA, 444 bp, Homo sapiens
  misc_feature (1)...(444): n=a,t,g or c
tttttttttactgttaaacaatcttttaatacctttggaattactctttataatttttatacttcaaattaagaaaaccgcccaatgttcaggcaactttggcattaacatttccaagaaagggacaaaaacaactattaatgcaacatcatgaagagattggggacaattgtgggtgtctataaagctctctttgaaaagctctttaaagcgaactcaggtaaatgggaaatgaaatctggactttttacttaggccaaataacaatgaggtttgaatataaaatgggaagnttcagggccctttctacctaaggatggaagggcatttagtttgctcaaattcaaactccaccaaatacttctgnatgggaaagtttgggcaacagnactgggacctgtgggggggttcaccaaccttttttggtccaagggtgatcnggtt

SEQ ID NO: 884 - DNA, 299 bp, Homo sapiens
  misc_feature (1)...(299): n=a,t,g or c
tttaaaaanttttttctcatttttattgattcaaaatgtcattcaatatgtaaaccagtttgacaacttgaaattcagggcattaaaaaatactccagaggactaggcactaattagcctaagaatgcactctgtcctagtcactgtatcctgagttccaaccccaaagacctctacctactgttaaagcattgaagatactgacttaactttgtcaaacatcttttgagngcaatcaatatatttcattttgaaggtcaggggtcattttgcctgttttacattcagaaggaancaga

SEQ ID NO: 885 - DNA, 372 bp, Homo sapiens
caggtttttgagagaaaagcgattccaacttgggatgaggacagagtcaattgccatgcttgttgccactgttcagggaagaagctctaagttgttcaaataattaattagtgcaagtgaagcaggaagagcacgtacatttccgctttattcaaatattgcataaatacagagcagttgggcacatccattctaaggcactgttctggtttgaatgcaattccacaagagagaaaagagaagccattacattctgtatttttcatctctacattcagactcctcctatattatatgtttattgctactggggatatcaatttgagccccagacttatagccagcatcatatgttgaccccggggtgacagg

SEQ ID NO: 886 - DNA, 253 bp, Homo sapiens
  misc_feature (1)...(253): n=a,t,g or c
cgngcaaaagtgtttatttttctccttcagatatacantctattggggnttccgtgccactgaccaccatgtacaaggaagggnttcacaggcaagggggacaggtgagggcagcccccacttcactcaaggaacagggcaagggggcccagtacagagaacagaaatctcttacgacagcatcgtgccctggcagangattctgcatantcacctagaaatttcaattctaactgntttgatggaataatag

SEQ ID NO: 887 - DNA, 249 bp, Homo sapiens
tttgtatttagcaggtactataattttataattaattttacaattcatgtagcaaatggaaaatcatacagagaggccaatgtatataaataagagtttatacagaaactgccaattcacaaaacagcactgcatggtttctatattgcaagcacaagacatggtcacatggttccactgtacaggtagaaacaagcccacaggcaatacatagagtaccacctgtaacgaggcccttggagctgctca

SEQ ID NO: 888 - DNA, 398 bp, Homo sapiens
  misc_feature (1)...(398): n=a,t,g or c
acagtttatcagttattacaatgactttttaactttttaaggttattcctccaaaatgctttacccccaaactgcccttgctgtaatgacaattattgctgtttgcagttaatactggtacagtgaaatgtcccagggcagttgtagggtcaatccaatgaaagtagctactgaaatttagtcatcagttacctttgcctgcttagactgactagagctggattcaaaggttgcttaaaaaacctgtcttccacataacaaagtgctgctctagcacaacctgagaactaccctggccacagtcccttccaaaataaacctacaggactttattctagcactgacctnttacagttatgccatcccttgaaataactttttaggaatgtcggattctg

SEQ ID NO: 889 - DNA, 399 bp, Homo sapiens
  misc_feature (1)...(399): n=a,t,g or c
caaacccagctcttttattttatcaccacagtgtattttacaagcttaaaataagttgaaatgaattttcccagctaaagtagtttgccattaggaacaaccaacatttctcaagtctcttgtaaaataaaaagagcatcangtgaatttaagtagactaatcagaacaatagaagaggcaggaggaggagataccgtctctgactctctgaatgaaaggagacggggtttacaaaggagctttggaaatattatacacagacaactagagacaaacatcaaactgganttctaatataggantnttgntgantcatgagtaaggggacttattccaccaatgaaactggcangttataagtgnacagagggctttcactcataactaagttagcgnca

SEQ ID NO: 890 - DNA, 505 bp, Homo sapiens; identical to SEQ ID NO: 606
  misc_feature (1)...(505): n=a,t,g or c

SEQ ID NO: 891 - DNA, 522 bp, Homo sapiens
  misc_feature (1)...(522): n=a,t,g or c
ttttgcaagttgaatatttatttaaaaataaatctcaaaaatatctattgacagtacagtaagaggggcatgtgcaaacaacagaaagggggaagtcagtcctgctgtgggaagcccacacatcagtgtgttggagcaaagttcacgaaggccatggntgactgagctgtggtntacgaaatgacattcagctaatactggactcggttcacctttgacacctggagaggtngggaagccagggggtggggagtccagctggggatccttgtgtttaggaagggggcngccaagggatgagcctttnggaagaggccccgttnttgcaagggagggctcatttcacaagccaacaggccttntagctcgccgctccagggtggatnttttggtgacctgaanggccctttcccagtccaagttggcttttgcaattggganggttaaggttcagcgangggtcccagagacagaaatnctttttaaaaggaaaaaaccaaanccaacaantcaantcaaaat

SEQ ID NO: 892 - DNA, 361 bp, Homo sapiens; identical to SEQ ID NO: 609
  misc_feature (1)...(361): n=a,t,g or c

SEQ ID NO: 893 - DNA, 441 bp, Homo sapiens
  misc_feature (1)...(441): n=a,t,g or c
tttcnnaaaaaaggcttatatttacttgatttgaattttgctagcatgctttttcttctgaattcaagtgactagaactgaaattattccacctggggagaagagacagctgaaancaatttagtattggttttcaaatacatgaagggtactcagagagaggatgattgccaaagaaaatggtctttgaaccatagaaagaatctgagcttgctctaaagttaaatttccngacttacagagtttatgacattaaactgagagaccaagggatcctttttggagacttcaaaaataggatagatccttaaatgcctgaggatggcttgggatgtggctttgtctgaagtcaggagggataaatcttaccncttgatgggcccttcagggcgtgtgaatctatggggtttgactgggcatgtcagaagctaggantgccng

SEQ ID NO: 894 - DNA, 451 bp, Homo sapiens
  misc_feature (1)...(451): n=a,t,g or c
naattgagtttcagtgttagagaattttgttttattgttttggtggcatgggcataattggagaaaccattggggtattcactagtaacctacattgttagtttccttggttccagcaggtaatacactgggttccgtcaccctggagatggctacggggaggctgagtgacttcccaaagtaataaagagtttgggaatcaganttccagggtctgactcccagcagactgttctatttccttacanacctgnactttcatcaatcttctccagctacatttcttgtgcccctttcaacagcatctgcagggcagggatgatcttttcccggattaaaaccagttgcaggaggttccctgtttgcttcccttttggggtttttccccagggggagggggaagnacagaggcagcttgcattcacatgggccccatttnccctctgnttcc

SEQ ID NO: 895 - DNA, 576 bp, Homo sapiens
  misc_feature (1)...(576): n=a,t,g or c
taccttaaaaaaattttaattttccccaaaatataaacaaagaaaaaacataaattggatcataatgcatatgctcacatgtgccttccaaatcacacttgttatgtagacatcataaagaataaaagttacccattaattatatggcatgcatcagcagtgcattggtgggcttaaacttggttttcagttatgtgtatatacagataaatctcttcctgagttgagcttcatcttcagttgagacccaaatcatttgctttcctttatttggcaaggtacttgaccatgtgataaggcaatcaaatgtttcaatctccttcccttttcagcggcatggccctcctctgtgagatcaccaatgtgacaggtatgaggacagaccctaaaatatggtcctgtaaaactagagcaggtttccttgntcattagtctcaagggctacagactgtctcttcatatatttggggatcttgagggtttcagttggaacagattcaaaatgggtctcctttttccctgggttgcccaaaganttgaggtttccnagtagtgacggtttaatgggaaaaacac

SEQ ID NO: 896 - DNA, 539 bp, Homo sapiens
  misc_feature (1)...(539): n=a,t,g or c
catttctaacagtttattgtataaagatgttactcttctatttactgttatatactgtaaggccttctttaggcctttagctctgttcctccagtaataaaaaagttaaaatatgcttcactagtcacacattccccataccatttcngtgttattcacattccccgtaccatttcttgttattcacatgtacagtaaaacaattgtttcttaaattatttttattttggttctctcattctcttccctatttatcctatacagtgtctgttacgattgcctacctctttcgctatcctatagcgtcagagacttagggttctngggtaagcccaagtctgctactgccaccgtgcagtgccaggcatattaaagggcatgactcccaacatgtaaaatgaggaagctaaactggaatgaaattaacaataaaatgatctttttttatgggttcttagggagataactataggcttagcaaaatttcagagggttttggtaaatgaaactgggttcaacttcagaaaaacagccatttc

SEQ ID NO: 897 - DNA, 380 bp, Homo sapiens
acagtgatttatttttattgaaaatacaaagtaatattaaagaaaagatttaaataaataaagtcattccatatcccgctacactaacacaatgaatttgttttgcagattaccttccacatgcataaagattttacaaagtcacaatcatagtatgcatactattttgtattgtgctcattttacttaccatatcaaacatgtccacgtttctacagtcttccaaataattattttaatggcagtataatacttcactatttttcttatcccactttcttgacatggagtttttttccccaatttttgttattataaagaatgcagacataaatgtcttcatgcatttatcttttttctggaattatttttaagggtaa

SEQ ID NO: 898 - DNA, 396 bp, Homo sapiens
cattttgaaaaatgtttatttaccttaccttttcttggccaagtcaattgctttggtcatctgcacaaagattctaaacactggctttcagcatttctttttccaagcaaatgaaatttatcataacaagacagagctctgattttagtctctcgtcggagtctgggctctgatgacctaggctagtcatcatctaagcctggaatgactgtttgggacccccatggccagcttgaagctttccttcctcagccactctgggcccctgaagaggtcacatgcatctgtggcagagactgtattataacaaagttgtttaccccaaagtcagcaaacacatgttacctagaacttcatcccaattgtaggttgctcaccagacagggttacacgatg

SEQ ID NO: 899 - DNA, 357 bp, Homo sapiens
  misc_feature (1)...(357): n=a,t,g or c
ctcgggaaactnggtttaataaggacaattccagaggggcctggctgtggcaaaagctgtgccaaacggttgggatccagagctaaaggcacttcttgccacgtgagaccatgggcgaggctccccacgctatctccaccaccacagtcatgagagccaagcgacgactggcctgtgctcggcggctccacagctgcccagctccacctccggcatttactggtctcatcctgagaggcattgggtgcccactcactggctggatgctgggctggttcatgggtggcagagcagggggtataccctttggggatgtcctaaacccttcaggaccaagaggcagcaccaagcagaatt

SEQ ID NO: 900 - DNA, 532 bp, Homo sapiens
  misc_feature (1)...(532): n=a,t,g or c
ttttaccctttaagcctgtttattcccttctgtcatactcacaagcattttttatcctctgtgaagaggttaagttacccacccaccaagtctttgctccagcagcttgtagtgacccactgaaataaaacagaacatgggaggttttaggtgttgcaaaggatataaatacaagggcagtgattagtagccttctgttattagctaataatgcagactttttcttggataaaatggagtccagggtcccacattaaacggaaaagggccctgatttcaagggtgatgtgatacgatactatgttggtcagtcagttcaggaagggagatgggctggatatccctcagagacagaagaaattttgtatgcagaatcaaagcatgacagaggatgtcagagctgttacgcattgttagctaaatcattgggaacataagcagtggaactggagggcttcaagttcatgtagatctggaaacctgcntaatcctttttggganaatgttattgcagaattccncccccttaagg

SEQ ID NO: 901 - DNA, 265 bp, Homo sapiens; identical to SEQ ID NO: 614

SEQ ID NO: 902 - DNA, 334 bp, Homo sapiens
  misc_feature (1)...(334): n=a,t,g or c
ataataatcattttactaaagcaaagattaagtacacattttcccaacataacaatttcatctatggataggcattagctacatgattttncattttaaaaccccacaatgattatttttcagacataaataaaaaatacactggttctagatgccaacaaaatcacatttgcaaaccttaagagtttggtaagttacaacattaagatgactaacgatatgtgtgcagtattctcagtatagaatacccaaaattcccgtgtacatctgtgttgcttgagtgtcccagtatgggaggaggtagacttggcacatcgaaagccactgctatact

SEQ ID NO: 903 - DNA, 203 bp, Homo sapiens
ctcattgtttaggattttctttttattatcaaatctctgctatagaaacactgaagaaaatgggaaaaaaaatcactggagaggcagcataaaatggtggctgaaaacaagaactctggagccaatctcagctctactcccttactagttgtgccccttaggtaggatccttcaacatctctgcttcagcttagccatttgta

SEQ ID NO: 904 - DNA, 493 bp, Homo sapiens
taaatgcatgagtattttaatagaaaaaaatattaaaaacaaaaccaaaactcgtatggaaagaggcttctgactaggccctcctttctagcagtgtttggcacctgataacaatttgacgctgggggagggagcagcttgacaaggtccacatgaagcagccttgagatttttcgcccacttccatttctcctcagcatcaaaggaaagtgcatggtaagaagtgaatcagacagcgagggatctatgcagttatcctgtgaatgtgtggcaaagcatcatggacgcaaacctcctgtcttgagtccagagctgtgtgctttaagatttgaccccagtaaagacagaatccttccaggctcgtcccttcccaaacctaaggggctgtcctttggccacttttcaacttgaagctggttgagcagtctttaggatatgtaacagcctatttttttggacgatataggaaccacgacctctttaaagtctctaa

SEQ ID NO: 905 - DNA, 394 bp, Homo sapiens
  misc_feature (1)...(394): n=a,t,g or c
gaggctaatcacgtatttattttttcaaaaggttaaatgtaagcttttcccaactgaaatatatagaaaaccccaatgtatgaaacaagttttaggcattggtgttggcagcggtagtgggctgatgtgtcctccctgcacacagctgggggcatgtagcccttcccctctgggtgaaccctggggaaatcttggcaccctcagcctcactgccttccaatctcagctcaaagactgggcatcctgcctgggaccacggcccccccccccaatgtccctcaagggagtacaagaagtcaccangcattgactgcccatcctgcgtgtcctccttttcaggtaaaataaagaaggtaagcntagcttggggattttcgcgtgnccgaaagttnaa

SEQ ID NO: 906 - DNA, 333 bp, Homo sapiens
  misc_feature (1)...(333): n=a,t,g or c
ccatgaaaattcagtgctttaatgtatctaatatcaagcaggtgaacctgataacacatacaaatctccatttgtgaattaaaacatttccttcatcatttggacttatcacttaattgagaatgttctgcactccaaaatactgtggtttacattccagttgttcatgacaacagagcttaatgtccagttttaattaataaaagtcttgttggcaattagaaagattttctataggcaggaaagatgaagtgcaaatttaccatgaatgntctgaagcaagtatttcccaacttctatgcctnagtgggnaaaagttttttgggggttacc

SEQ ID NO: 907 - DNA, 448 bp, Homo sapiens
cttcagtctcaccagtaaacataagaatatttttggtcttctccacatactgggcccgctgttccaaaagtttcttttgctcttccttttctctgagacgtttctcttcctgttctttaagaagtttctgccttaacagctccttttcttgctcttgcttggcccgcagctcccgctcttcttcatcttgtttgcgtgcccgggccacatggtactgggcctggctcagtaagtcagaacactgcctggcttctgtagcagcaagggccaaatcaaatctcattttatctcccactttactcaaataactgaagtatctatgtgcaagctccagttctttcacagcattaagtacttccttcagattacttttttcatctttcaggacagaggtagctaatctttgcaggaccaaggccaacattaaacataagaactgtatcactgg

SEQ ID NO: 908 - DNA, 428 bp, Homo sapiens
  misc_feature (1)...(428): n=a,t,g or c
tcaaagactgggtctcactctgttgaccaggctgttctcaaacttccaggctcaagggatcctcctacctcagcctcctgagtagcttggactataggtacgcatcaccatgcctggctatagtaagttttgaaatcagcagtgtgagacctccaactttattgcttctcaggattgttctggctaattgagatccctttacgttccatacgagttttagaattagtttttctattaatgcaaaacttgtcactggaattttaatagggattgcactgaatctgtagatttctttgggtagactgaacatagggtatcttcccaattatatgtgccttctttccgcattttccaagcaatgtttttgtagttttcagggaacaagtcctttcacttacttgggtaangtttattggcnaagtatttta

SEQ ID NO: 909 - DNA, 532 bp, Homo sapiens
ttgattgatttaaaatatattcaccctccaactgttatctgttacattttttaactttttattttcttattacttcatagtggcagtatgttgttgactcagtcaccatatcagtaatagtgactctatctctccaatgtccttggacttagcaaaatttactcgttctccatttatgcgtggtcccatggccatgaatggcttgactgggttcctgttaagtctccttatgctagtctcttttcagtcttgaaagtcttagccctgcctctgaagaattaatgtggatcctttcacagctttcacctaggtcatgaggtttaaattgttggagaggcccactgtgatatgattgtaagagtcaccatgccatttttacaaccttgagttataagtttcttgtaggtgcttcactagcctcatgatatgccttgccagaagtagcgcctgagatggagatttgggtgcaggtgatttattgacgatgtggttcttcaggaaaaatactttctattcacattttcctcgtgcc

SEQ ID NO: 910 - DNA, 415 bp, Homo sapiens
  misc_feature (1)...(415): n=a,t,g or c
attttattcctccaactacgaagacttgtttctgggcatccaaattttcataaaccttgaagtgggcactgacgctgtaaatgtaatcctaaaataatttatcttccttcaaaaatctctgccatcgtgactttacataccacacacaaaaaagaatacctggaaataattcaaatgtataacaacaagtgtatgtcatacataagaatactatacagagtttaaaaagaaaactagatctacattgttaacatgaacgaatattcaaaatgaatgtgtgaaaaatgcaagctgcagaatacatgtaagagtatgacatccactgtgtaaagtttaaaaacacacaacagnctacatattatttatggatacntacatatgcngaaaagggtattaaagcatggtacacaaagga

SEQ ID NO: 911 - DNA, 279 bp, Homo sapiens; identical to SEQ ID NO: 621
  misc_feature (1)...(279): n=a,t,g or c

SEQ ID NO: 912 - DNA, 615 bp, Homo sapiens
  misc_feature (1)...(615): n=a,t,g or c
tttttttcagtgtccatatttcaaaaatttatttatctcaaactgtgcataatggagtaaaaacttaagttgaaaatgtacctgttataaggatgatattagttcaaatatatacatggattctcggcagactgattcaaataatacagagccgaatcttttaaaatacaactacggaaaataaaggggggaaaaccttaaaatatcacaataaatttacagaaatattacaaaccataagaaaatatttcaaacacagtaatttcatggttttttttatctgaacaaaatggaaagttgggatcgaacaaaagctattataaattaccaacggtgtncaacctgcatggccatttttgctttaacagtaagttataaaatttagtacagtctaaaacttttggcccttttaaacaagacccngagatggttcgccgtactattctaattttttcctttggacaatttttaaacaattaaatgtccaattgataatttcctctttcacgttgcaaggccnaattcagcggngaatccaaatcngcaggagccntcctgaaaaattggnaaattcccgctttacaaaggcattggatgcnggttncccggnaaaac

SEQ ID NO: 913 - DNA, 454 bp, Homo sapiens
gaagaccaggaaaacaacaaagctcatgtatttcaccagctggaaaattcatctagtaaacaggctgtttgaggaaatctcttgacattggaagcatgatgcacacacgaccttaaaaccctaccaatagctctgatggaggaaagaagggaacctgagctagcacgttggtattcacgagggctcttctgtcctgaattggtcctctcatctctgggaaagagaaaagtgtccctaaaaaccacaatagggatgagatgtgccttcctagattcaagtagattcagtctgagacagcaattttgtttttatgtaccaacagaaaacctaaacaagcaggaaataaaagctacttccctcactaaagatatattaagggccaaatatttgttctaaattgattgctaagtctattagatattttgaaaagaaaataaacccccgactatttaaa

SEQ ID NO: 914 - DNA, 317 bp, Homo sapiens; identical to SEQ ID NO: 622
  misc_feature (1)...(317): n=a,t,g or c

SEQ ID NO: 915 - DNA, 460 bp, Homo sapiens
caataacataagagtcaggagagttgggaggtatgtcctagggatgtgattgactcttgacatttaacaactttgaacaactgtgtgtaaagtcacagacagaggaagcaaggatttttgttatcggaggacgtctctctctctggttggaagtttggtgcttgggtgcatagtcttccagagctgagacaggaaatgtactgtgctgagaaatgggccccttgccagatgctcccctctccttcctctctgcgaggcagaaagtcagaaggtagagattgctggcaaaactgtgaagtcccaccctggggtctcaaccccaactccactgaagggcagcctccctgaccgtgtgtgactaaggcagtaagggtggccggttgatggcggccgggaaaccgagttttcgaaggttcacatggccaagtctggcttctgattctgctgccctgcaaagaaa

SEQ ID NO: 916 - DNA, 465 bp, Homo sapiens
gtgaccccaggcaattttattactttatccctgaacctcagttgcctcatctataagatggggctaataatagcacccatttcataattatgaagattaaatacattaaggaaaacactagtatgtccctagtacctgctaaacactcaacaaaagttaactgtacatactgatgtctcaaacagggacggaatgtttaacacagaaaacaggaggttttagcactcactcgttctcctggctcccgaaatatgagctgccctgccccagttcatccaagcccatcaatatagttgtcctcgtccttaatctccacaggtgttcaatgtgagccaactgtcagatggctttcatttgcacaactggaataaaccatttatgcctagtgttccattactgggaacgctaagcttatgggagttatttatatcttactgctcgaggtcctcaccaagatctgatttg

SEQ ID NO: 917 - DNA, 258 bp, Homo sapiens
  misc_feature (1)...(258): n=a,t,g or c
tttacactttactgagacaattttattcactatggatatatatacatgatcaacattttatcttcattcttcagaagacttaattagagtagctttcttctcatacttatctctaatctctttaatattttccgagagatcttctgacatgcattcntcatattctctatcaactttagcaatctgctcctcaagatgtttctctacagacccaacatgtgtagcaaccatctctaacagacgttgcaagttaatttc

SEQ ID NO: 918 - DNA, 529 bp, Homo sapiens
  misc_feature (1)...(529): n=a,t,g or c
tgtgatatgcagaatttgaaattttaataagtcagaattgcaaacttgtccactgtgcagaatgcgcaatttataaaatatggtaaattgaacttcaaaaaatgttgatcaagtattcttaattaaaatgttaatatattttaggtctctcatttgaatggatatccatcgttacttagcaaatgcctgaatttactactggtattagcaaaacttgaacatttataatcctgtacagatgaccagtgtttccttgataaagttttcatatcagttctctctgaatgatgttttaaaggattctgtgcaacatttttagctctgatatttaagaaacagattattatatcctttagcaacttggacaaagtgattgatggcacacacttctccatcaaagagatgcttattcacatctacaaanagatccatatgcccagaaagctcacataatattttcnggtgaagatacaatccccttggtttagaactagttcaaaattgccatcctggaaggggtctacaactc

SEQ ID NO: 919 - DNA, 435 bp, Homo sapiens
aatggaagggtgttggggtggcagtttttatccttgaagacctcagatatgctaagtcaacctaagcaaagtatactcggtggaacctagctctgtggggtgatctgcaaaatagagtatcctggtcatgtaagttcaggaaatgctacagactcaaggattatttttggggattcaccatgcacagcacacattgaaggctgaaaagtccttgcagaaaggaaactgacttaactttgtttcttaaggatatttgaccacaaaacccttagtctgcatcacaccaacctgatgcctcctggaacctgtgttctgtagaatgcgtattagaaaatgttggacaacctgtttcattatcagaagtcccatttctgaggacagtgttctctgcctggaaataaggtccagattctcaattccagggacagccaaggt

SEQ ID NO: 920 - DNA, 166 bp, Homo sapiens
tgttttttaaagctctttataatctgctcaagtagaatttctaacacaaaacccttttttgcttaaaaagcagatgacaaaggaaatgtcaaataatgcacatgaatcttcagctattttcctacccccaaatgagatatggggctgcacagcattcattacagat

SEQ ID NO: 921 - DNA, 409 bp, Homo sapiens
gctattgtcaagacattgtgtagtgggaacagacttcaattctccataacggctcactaatttaacgctggaaatttctttaaaatccccagaaatgggatcagctgcatttctgccattacgtccagcatgttctgaggaatgaacattagttgttccctgagcaacactgtcttttgagtcatctgcggtactgtcctctttgacattcctgatatgtacctgaggattccctgaactttttcttcagtgatttttgataggccttggaatcttgagctttctcatcaggggtcagagagaagctagatcttgagacacgacgtgctggctcctgttcacgtatttttcttggaaattcagttgacttccttccactctgaagactttcaatttcatacctgaggga

SEQ ID NO: 922 - DNA, 266 bp, Homo sapiens
tacatgtatcacttaatcctcacaaccacctgaggattaataccatttacctgtcttacagataaggaaaacaatcatttttcaattatgactatgcccccaaacactggtttggatggagccttcactggtatagagaatgaccttcttcccttagactagactctggctataataaaggatggtttaatcatcccctgaagcaatgcataagataatctgcaatgtatcttcacatactgtaccttatttgataggcaagagac

SEQ ID NO: 923 - DNA, 203 bp, Homo sapiens
  misc_feature (1)...(203): n=a,t,g or c
aacagtttacttttttaatataaagattttncaatttacacttgtaggagtagaaaaaactaatatgctaagnctgtaagctacgcagcaaaaataatgatcttaatgaagccagaattctgtgaaaatgtgcaccacactgcatatatagtagctgagtaaatgtaaaccatgngcttattaactcttctatataaaatatt

SEQ ID NO: 924 - DNA, 432 bp, Homo sapiens
tttttttcagatttacaagtttggatgctttattacctaaagtcaaaggggaagatacaaaagctgtttaatttaccaagcaagtgcagcacgcctatggaaagctttggccctttttgctaagctgtcagatattcgaggcagctggccagacggctgtgttttaaatccaggcttaacattttcgaggctgctgaataatgtagatccttttcagtggaacaaccttttccagagcaggtgtgggtttttgatgcgccatgtgcactgttgctggaaatttatagttgagcttctccagtgtgtcattcagggcatccagtgtctgtattttggcaacatttgcaatggcacttgttttctcgaatcctgtttttttggtatgtctttccaaggtgccaatttcttgttttttggaaattctcattcctc

SEQ ID NO: 925 - DNA, 509 bp, Homo sapiens
ttttgttgttgctgctgtttttactcggacaatgcttattttacagcggaattgacaaataaagccttattttacacatccgaagaaacaccatcacaggaggtttgtaggtcggctgtgtgctttccaaaacagcaaaatagattcttcccatccaaccccctttcctcttgtagagtagggtgtggctcgtggggcttcgtctctctgcaggcacagaaactggcagacctggtccctcctgagcgggccctgctcaagggaatggtgccagattttgaacacaggtaaacaggctccttcataacaacactgtgcatttctgtgtcattttgtttattgctcactgagttgttgccacctcagctcttggtggaaaacagtgggtgtccagaaattgctgacacaagaagatggattgcctatggtcgttagggacacagggcagccccagccagatcccagctggtccatgcagggcatcgtcagtagaagctcaacgtcccact

SEQ ID NO: 926 - DNA, 284 bp, Homo sapiens
ggggtctagcgaacacttcttttattcttgtttgaaagtatttttctgcttacaaaagtaacttatacttgatctaaaaaaaaaaaaaaaaagaaaagaaatcacacaatgttaaaagcaaagattcacccatttggccccagaagccctgcggacagagaagagcctatggtcgggttggtggcctgggaggatgcgcctgttgtcaaggttacagggacttgccgggcgccacagagcagggggcaaagttctccccagcagcctcaggaggccccgctgct

SEQ ID NO: 927 - DNA, 384 bp, Homo sapiens
accaatgcaaaggtatttattaacacattttatttggttaaaaggttattgtttggttaaaggctactaggtaaaaagaagcttaaataaacaggaaggtaagttatatgatgaccaaaatgactcaaaaagtttaatgttacaaaatagctattttatgcacatatacctattaataaacattaagaatggacaaatcaacactccatgaaaggccaaagaaacaaaaaaaaaaccttttcattaagcatttcatcttcttgatactatatttctgttttgattccttatgctttgaaaattcagaaaaaccagaatccataaattcacttcatcttctcatcttgtctctgaggcttggctctttaaaatagaaaggagtac

SEQ ID NO: 928 - DNA, 401 bp, Homo sapiens
tttataaagttaatatacaaatgtattctatttttaaaatggcacagaatgagaaaaaattcttcatgctgataagtgcctcattcccaaacagggacttcaaattgatcagattctcttgcaggcaaaagctttgcagcagtctgcatttactggaatattgctctttgaacacggccacattcaggtttgttaaatatatcctcttccgcttctggagttagttggatgttatctctgactggggacaggggtttcttacaaggaggaagcttttcagaatcttttttaaatccaaagtttttccagagctcattgagtttgatctgtaaccccggcttgttctcggcattatgatgctttctcttctggatgcttgccggcttcttgctcagcccact

SEQ ID NO: 929 - DNA, 423 bp, Homo sapiens
tttttttttcatcttataaggaacatttatttggtaaactatctcatagaaatagactctaaaatcaaacagtttcttaaacaacagagagcataatcccaatctctccccatgaaaagcctacttcataactgaagtacctaaagcccatgaactgcattactagaagaaaggagggaaaaagacatttactaaacttccacaggaagactgtataaatctggaagtggttaagtacacatcagcctgtatccaagaatactactcagtctcaaaaattaactgaaaatctaaacttaatatggatacttctttgttcttggtaaggctcagaaaattaccatctatttaagtacgcatggtactagttacatgtcaactgatataataaaaaaggtgaagtggacaatcagtatttcaaac

SEQ ID NO: 930 - DNA, 409 bp, Homo sapiens
tttttttggtgagtggcattggctaaaatttaattgtagcctttttaaaaattacaatttcacattttaacagttactttccagcatttaagcaaatacagcaatatatagtggactaaaacaggcaggagtcagaaagagaaagccaatgttcagtgaacgtcgatgggactgagtgctgtggagggtgagtgagacatgcatagtgccagatgaggaagtgggaacaagggaggggggcgggaaagtatttttccacttggcctgcgtcaaggctcagatctggggctggatgagtggggagacgtctgccatctgtgtgtgtacatccctaaatgtgaactcatcagccatttcccaatggaaaaaaaaaaaaaaggtgcttaaagaaaacagctaagactctgcc

SEQ ID NO: 931 - DNA, 280 bp, Homo sapiens
atttcttatttaaatctttattaaaagaaaaaagatttaaaacaagtaacaacaaatttcattaaatattaaacattttaattatcaaagatatttagacaatacgtttctaacatttctgcacagcagaagcacactgattatagagctcagactgtcatgtgctcatgtgagtttatttttggcataamagtatctaamgtcacatttaaacaaatgtgataatatttyvtaacytgatagtacttacctcgtgccgatttcctgcmagcccgggggw

SEQ ID NO: 932 - DNA, 131 bp, Homo sapiens
gatctctaatgaaaaagggatgtctttttgtttatagtcatgtggcaagatgagagtaaaaccagagagcaaacctctataagtgttgagtatatgtatacatttgaaataaaccagaaatttgttacctt

SEQ ID NO: 933 - DNA, 320 bp, Homo sapiens
  misc_feature (1)...(320): n=a,t,g or c
ctgntgtcagcacagttttatttgctgtggaatccatgagagccggaagcatcgttggggccgtggctagcagagctcatggtgaccagtcctgggcctgaccaatgggtgattacatttaaaaaccaaaacaaaacaaaacaaaataccaagaacagatcacttgccatggacatcagtaatctattggtaatggtgaaaatttcatgtaaatttcccctaaaccataacaaaaactgtcctccttaccccaaaagtgctggaggaaagatggttgcatgacttgacctctctttgaacttgaaatgctaccttcctac

SEQ ID NO: 934 - DNA, 307 bp, Homo sapiens
  misc_feature (1)...(307): n=a,t,g or c
ggctttttaaaatcactgtttattccatttggtagagggttttattttttnccatacaaatatttgancaattttgaattccccaaaaccatacatagacgataaataccatgctattaaagtattaaatttgtacaaaaatactttacagtttaatacttgtttgttacaaataaaaatacatatttaagtgactcatgatcttttttnctttttncttaacatgatcctgctttatactttctngccctggcggttctgaaatgtgattgaaataatatttttttngcacaaaaagaaaggngat

SEQ ID NO: 935 - DNA, 415 bp, Homo sapiens
  misc_feature (1)...(415): n=a,t,g or c
ntgantggaaggagtaaaactctttattcatagaacacatgactgttgatgtaatttacaaaaacaccatgagaactcacagtttagcaaggctgaaggatacaagttcaacatcaattgtatttctatttactagcaacaagtggttagaatttgaaattttaaaataccatttagcatcaaaactatgaaatgctgacatggtagacctgtacactgaaaactacaaaagattattaagagaaatagaagacaaaacattaatacctagggnagacagaccttgtttatagggccagaaggacttcaatattattaaggntggtcaattctcccaacagttttattataaattccaatggcaattctcaattcagggngccccacgggggttttttggtggtggtggttgtag

SEQ ID NO: 936 - DNA, 433 bp, Homo sapiens
  misc_feature (1)...(433): n=a,t,g or c
ngggtaagaacaggctttatttgtaaaaccactcgtgactctttacaaagcaggatacacagaagggaaaaaaatacacagtgcaaaatggatgttctgagtgccacaaggatctgctgaaaaaagccaaagatgtaagatggctgggtatatatgagaatgaatatttcactatattctgattcaattaccagtctcagtgggcccagggatgagcttttgggtgtgggtcacatgggccaacatttgggataacaaatgagggaataatgggtacccgcctcactagtgcctgaggaacagcatgttctgggaaaatgtctctnggagttaggagatgtgttagctttttccattacagntgggnggaatacaatgttttacaccaccgtcccgggggntgggggtccaaagttngggaggtttcctttag

SEQ ID NO: 937 - DNA, 375 bp, Homo sapiens
  misc_feature (1)...(375): n=a,t,g or c
agcantgccctctccccacagtaataaaaagcactgtacataatgccctgggaagaagttagacatgaactccaatacttcaggacaagtatggttctcaaagtgtgatccagggaccaaccctctgaggaagtccacgaggtcaagctattttcataatactgctacacagatgttatttgtccctttcactctcattctctcacaagtatactgtagagttttccagaggcttcatgaagtgtgtgtggtgacattattgctcccanggctaatgtaatgtgtgcatgtgtatttattttaaaaatggattcgctttaatttcnagtatgggtaagtatccaaagnaccaaatataagcaaagcnccttgaga

SEQ ID NO: 938 - DNA, 388 bp, Homo sapiens
  misc_feature (1)...(388): n=a,t,g or c
tttttttttttttttctcaattgagagaatatttaattttacaaggcagagtccnccttcttcaataaacatggataaaaatgatccncatgtaatgaagtaagcctttccatactgnggttctttcccagataggcaccacgaaaggtgcttaaggatgcaaaatagccacagatccatagttcaggttgaaagtcacaaacagtagcctttttgagaaacctcaaacaatggaataaaagattttataacctgaaggtaagtagccatttccaaatgtcctttgacctttgaaatatataatgtcttaagttttaccatattggaacgtgtaattattgtgcagtttatccattttaaaagtgaatccaaagaactagagactgag

SEQ ID NO: 939 - DNA, 463 bp, Homo sapiens
  misc_feature (1)...(463): n=a,t,g or c
ctaatacatgacaccaatggatattttattatagcttcttaattatttaaaaagaataacatttgttagtatacagttattataaacagttaattgtttacattcattatttgtattcaaagaatcctagccgatctgaaggctttcccatactgcttacattcatagagtttctgccaagtgtgagtgcttccatgcatttgaagtcttgaggctgatctgacggctttcccacattgcttacattgatacggtttctccccagtgtgagtcctttcatgatattgaaaagaactggaagaagtgaaagcttttgccacatttgcttacattcatagggtttccttctggtgtgtctttacatgtctatgaaagcaattaagcaagctgaatgctttcccacaatccttacattcatacggattctctctcgtatgagtccnttcatgtatatgcaaggaag

SEQ ID NO: 940 - DNA, 233 bp, Homo sapiens
catggttctgaaaactcttttttattgttattttacaatgtaccatgaacatttattccatgcacatgggtgaaaatcctctactaaaagacagagcactgtagttgggtcaaaagtctgctggtaacaagagtgacacctaaaggaaagtatcagcttaaggttaaagcacataggccggcaaatgcctgccaggaaaagcaggactggcaatattcccatcagagaaatca

SEQ ID NO: 941 - DNA, 448 bp, Homo sapiens
  misc_feature (1)...(448): n=a,t,g or c
gatacgtttctgccctttgtgtaaggaggacattttctctataatgagtaatcaaaggtaaaagagcacaggtaaataaggctgggaattggtgaatctttctgtgtactcacattatagctttggtttttagttgtctgtaacaactgaaatgaacaaaacaacaaaataaaaaggaaggctatatttaggcagtgtattagttcattctcacactgctataaagaaatacctgagactgggtagtttacttaaaaaaaaaaaaaaaagagttttaattggctcacatttccacaggctgtacaggaagcatcgatgctgggatcttttcttctggggaggccataggaaactttaaatcatggcagaaggtgaaggagaagctggcacttagcatgtttggagcagngggaagatggaggggaggtgctacacaccttttaaacan

SEQ ID NO: 942 - DNA, 454 bp, Homo sapiens
aaattcactacacaaactctgtgattaggtaagaaaagcgatactggcttgcagggaccttctgattcaagtacaccaagaaataagctcctcctcccccaactagatggtattgatcactctgcccacaaatggtacccccttcagcaagaactgcaagcccttcttggatttgccttcatgagaaaatggtggcttgggatggaggtgacattccttgctgtggtgaactgcaaagaaggaaaccaggcaatgtattccatagaggcctttaaagagacccgttggaaatgggccatggtctaatttggtgttgaaataaactaacctctttggctgtttctcccaaactgccaccagccaggcaaggccaatccaatactgactgctggctgggggagctcgtaatgggtgatgccgcctgcttttttgcatatgtcaggttacaggtgct

SEQ ID NO: 943 - DNA, 574 bp, Homo sapiens
  misc_feature (1)...(574): n=a,t,g or c
tgactgtgggaaatcttttaatgaaaaaggacaccttaggaatcatcagcgagttcacactacagaaagaccctttaagtgtggggaatgtgggaaatgttttagccacaagggtaacctcattctacaccagcatggccacactngatggctaataaggctgcccttctgactaaaagatttcccgcactcctcacagggataagctgtctttccagtgtggactcgctgatgttgaataaggctgctctttcgactataagatttcccacactctccacaatcataaggtccttttgcagtgtgatctcgctgatgattactgaagctgacatatctgctaaaggattttccacaatcactgcacacataacatccatctcctaagtggaaaaagttctggtgtggaataactgagtgtttggtgctgnaggcntttgtgcgttttccacaactggtnaataggttttncccccccgaaaagggtgggccatgcatagtttcantggccggtctnctctaaaggaggttcntcttgggaaaatcctgaactgggcagaangtcccccgggcc

SEQ ID NO: 944 - DNA, 556 bp, Homo sapiens
  misc_feature (1)...(556): n=a,t,g or c
ttttcacatcgtacatgtttatatctagaaaacgccaagtcaagtaatcagtacgtgaagcgggccgagtacccgatggcctggcccggggtgaaggctgtttagtgaccatggaagtgtgtgagatttcacgcacacgcattcatgtcaacaaggacatcaggagaagttaacattatactgaagtcttaagttaaaacatttctgaagtgtatggaaaggtttcactagctgttacttttctaaagtcccttgccctgtgttactttacccagacgcctctgctctttatcgtggatcaaagtccctggggcttttgtgtgtccccgtcaggcggcgtcgttggcctcagcaagtgccttggtgggcgaatgtgacgttccccccagctgggtcccggactggacagtgtgggtggttggtgccatcgcactcagcagacaaggtgagtgaccccagcccagccctcccttgtcccggtgccatccgggaaggtgctggggaacctgtcctttcccctntggcccggggtggcacctggnaaagcaagcccttg

SEQ ID NO: 945 - DNA, 423 bp, Homo sapiens
  misc_feature (1)...(423): n=a,t,g or c
tccccatcaaattattttattaggttaattaaacagcttaaagatgattccttttgtgtggtacccttctagaaaatatttcaagtttttaagtgaacttccaatacataaaacaaaattactttagcatacacaaatttcagatcaaaatacaacactctgtttctgttttcttacagttataaaatccagtcaatacaaactacataaaanagataaaacactttcactgatccttggtacaagagaacagcatgatggcaaaatgttccccaagcacaggtcctgggtttgtgagaagggaccaaccccacaatatactgaagcatgtaaacaaagtgcgtgctacttaatttaggttaacaaatcctttttgcatcagtattacttgtaaaccataaagcaacttttaaaaagaaaggg

SEQ ID NO: 946 - DNA, 398 bp, Homo sapiens
cctaacattattttttctcccaagatttagaatgtcacatctcatgttcctactagtaatcacacacaggattaaaagcccaaccaagaaagtattctttttataatatgttcttaaaagaagaaagaaaaattaaatgtgaacattttgtacaatagttgctgaagaacagtaaaaccaattccgaaatatcatgtgtactatacagaaaggcatggctcatggaaccaagtattcaacactacagcatttgaatatcagtctttaaaggttggtaatattacatcctgtacacagctctgtgtctctctacctgggctagcgcatgcccaggatctgtctgcttttcagttggtaatttttctcaatatctgacagggcttgagcgcagctgggca

SEQ ID NO: 947 - DNA, 312 bp, Homo sapiens
  misc_feature (1)...(312): n=a,t,g or c
ctttttaaaaggcacagtttttattttaacgacgctgcattgctctttgatgatgaatctcaattcgactcctcaaactgtcaacactcttgttatcctagattctagaaggggcctcatcttttgacttctttctatagagggccacttctaaagctacagcactcatttggaaaaggacactgggatgaacacgtaagcgttgcaagcacaggggccgcctctcttgcagacaggtggccaaagcagggcttgtgctgggccagaagtggaangtaattcctcgccagctacacattcagtctgactggt

SEQ ID NO: 948 - DNA, 359 bp, Homo sapiens
  misc_feature (1)...(359): n=a,t,g or c
ttttagcagcaaataaaaatagaaaaagtctacttttatttattggtaaacataagacaaccaagtctgagcatctggtgcagttcccagtgacggcacttgccctgcacacgctcttgaagcaccaggaaaaacacacaacacagtaagaaggcaaagtggctgggagtaaggtatctgcagattcaaactttgggattgaagtagctggtaaacagaaaggcaccgnatcagggtctgganagaccgggcttgctgggggaaggaatcttgggcctgcccaaggcagacangggacaagacatccctccatttnttcccaacaagcttccttggaagnccgagtcanccccaanggg

SEQ ID NO: 949 - DNA, 299 bp, Homo sapiens
  misc_feature (1)...(299): n=a,t,g or c
tgattggcttaaatgccaatgtagtttgtttctttgtctttgtacctggttctcttttctgtttcttttctaatctttgttttaggccttctagttccacaccatcttcttgagggcttccttcagtattttcattcttaattttctttttatttttcttttctgcctctgctttcatttctatggttantcgtggaangactcnttgaccacgcggagaaggnaaaacttcaggcannttgnggtgtttttcccccttggnccttcccccctttccccagggaagncgaacttgntca

SEQ ID NO: 950 - DNA, 398 bp, Homo sapiens
  misc_feature (1)...(398): n=a,t,g or c
ttctttgtctctctgttcttcaacttcttgctctgtttgggttcttgtttggcctctaacttccttttcttgtcacttttcaggctgatgatcgaggcgttcggccagctttgttcaaaacttcattccactcttcatcgtccccacggattatgtattcagagaggtccatgctcttcagcttccctacttccttcttgtgtttctcctgaaattcctttgctgcttcatctaggtcgtcactgagggtcttcatcgtgggctccatgaccacatccttcgctgccaccatctgctcctcaatggccttttcctgaacttcattaaataagcttcacaactttgcggatgatccggttgaaaagtcccatcaactggcccgaggnaggctcaatctc

SEQ ID NO: 951 - DNA, 355 bp, Homo sapiens
  misc_feature (1)...(355): n=a,t,g or c
tagtgatgccagctcctcagtgcggtactgctccagcaccaccacgccctgcaggcctgcgctgcggccngggcacagcctcgcagtgtaccaggtacgtgttgcggctgccattctcacttgtcacgaacaggatgttaaacacctccacatcgcactcgttgcagtagtaggctggctcgtccttgacacggccctggtaagcgattttcttccctgcccgcaccaggctctcgcgttgcacctggcagtgcttcatggactgcagcaggcagaacttgatcatcttgaacaagtcggggtcgctgattttgaccgtgcgagccacgttccatgacacgtgaatcatgggcac

SEQ ID NO: 952 - DNA, 478 bp, Homo sapiens
cttgaattattgcatcaaggactttccccctacttcgattcattgctaatgagctctttgcttcttcaactttttgaaagagatcatgaaccaaacttttaaagtttgtttcttcttgtgtaagtttttgaagttctttttctttctcctttaattcttgttcagtttgagggagttttccttctatatctctgattgcagctttcctttctttgagagtctcagaagctgcaattagagcttccttagccttagttaattgagacactgcagtattatgacgactgagatagatatcaagttctgactgggctacatccatctttgaacgtgcttcatttaccgatttgctgaaacccataagttctttctctcgactctgttaaaatatgagttcattaaatctggacagatatttactttcaaacctacactgaaatgaaaccatacattttatattcgatttaagaaaggagat

SEQ ID NO: 953 - DNA, 498 bp, Homo sapiens
tttttttatagacaatagaaatttatttctcacaggtatggaggctggtaagtccaagatcaaggcactggcagattccgtgtctggtgaggactgctctctgcttccaagatggtgtgttgttgctgagtcctccagagggaacgaagactgtgtcctcatgtggcggaagggatggaaggaaacaaaaccactccctcaagcccttttagaaggaccgtgaccccatctataagagctgtgccctcacgacttaatcacatcctaaagttcccacctcttgttaagtttcaacacatgaattttggggaagacagggataaggaaagaacatggtgattaatgctgtccccctggactgattttcaagctttctatggcaagagtttataggcaaaaacaaaatccgtccattgcatgtttgatagtgccatgaacctctcttttgttgcactcatcacagttgtacattaatctatataattacttaatgctcat

SEQ ID NO: 954 - DNA, 409 bp, Homo sapiens
agagattttcagaaataattttatttacagaaaattcacagaggattaataaaatgtcatgaatacaattttgttggtaataattagcagaatcaagagtagattaatatataaggtaacatgatatattaataatacaaactaaaatatcaattttatgctagctttatccattagtttttcatattccaattttaaacaaatctagaaataagacagtatatatgaaacaaatttgctaaatatttttaaattatgccacctcagatattacctcaattttaaaaccatctgtaaattaaatgaccttcccattataatttctaaatataaagaagcaccagctggaactcaaaatgcataaaagatattgttatatattttaagaaaatattatattagcaatatc

SEQ ID NO: 955 - DNA, 434 bp, Homo sapiens
ttttttttttttgaatataatttggtttatttctctttgactctctataaaaaaagaactggaaaaactattgtattaactgatttcaagtatagaagccatcttgaagaaaagacagttacttgagctcttgtatttatcagatgatgaaaagtgcagagaagaaacaataaatacaaatgttcctagtcactgtgtaaatcacatttaaatttgatggggttttctaagaataacactaagtttataagtattaacaatcttttaaatctgaaaaatgttttataaatatgggtattagttaatatttgttatataaagtgttgaattattaactatttctttaaaacaggacagatggcctaattaaatgacaaaagaaaacaacatctttttacattttccctactgatactgtacatatgtaatataaa

SEQ ID NO: 956 - DNA, 411 bp, Homo sapiens
ttttttttttttttcacatttcctggtttattacaaatgatattccaaaggatatagaaaaagaaatgcatatagtgaggtatgaaggaaagggtgcggacttccatactccttcccctttgcaccccccgaccccaggtggcaccctccagtaacatccatgtgttcaggtatccagaagctctctgaacccagtcctttgggagcttttatggagactttgtaacacaggcatgattgattaatccatcagccattggtgatccacttcaccttcagttgccctcctccccagatgttgatggggtggagctgaaattgccatccttctaatcctgctgtggtctttccagtgaccagccccatcctgaagctacccaggggctgccaggcatcagtcaactcatcagc

SEQ ID NO: 957 - DNA, 133 bp, Homo sapiens
tttttttttcaactttttgcaaagcagcatagcaacaatcgtgattgtagcacttgcctgaggttgtggtcacaaccaacgtagtaaacatcatttgcatatcagtaagaaaaagaaaacaggaggagatgag

SEQ ID NO: 958 - DNA, 495 bp, Homo sapiens
gtataaatcttgttttttaatgatgatctttttaaatgctgtgtttcccccccaatagctgcttgttggaatcactgctgcagccgacacacaatctgtgagcctgtttccgcctgccccaggaactgtaaggggtttgaaaacgttttgttggggtcaggaagggaggggttggagagggtggttctgtgtaaaacacgtgggttttcaacactgctataaatatagaaacgtcacctggagttatatacagtaagactttgggttctccatgggggtgggaccaggctgacgggccccacggcaggctggggcgggaggtgggagccagggccactgcgaggagaacgagggtggttggagcatccctgaggcagcaggcgccaggggctgcctcgtaggatgtgccggccccacacgcagttcgttcagggcagcaaccccagctgggtataggacaagaaaggattgggaccagggaaagtgggtgggaag

SEQ ID NO: 959 - DNA, 454 bp, Homo sapiens
tttgaaactccaaaatgataacctttaatgcttattagatggcacaagtgttaggttgggtattttactaaatatttaatcattgtatatgcacatatttatgggcatgtgagcttaatttctgtttttaaattcagaatgcttcaataataacattgcattttatataatcctgattttcttttttaaaatcagctcaaaaggagaagttaaatattcagctttaatttcaccagtagatttttaatgttttgtaatcataatgtttaatttgtgctgttcttagaactttaattatgaagctaaattgtactaatacccattaggtacttcttaattgaaggcacatcatatgtctgatgtggcagtactaattggtgtaattaaattctaatatgcttcagtagcctgatttttttaagtgaataaaaagctgatagaaataagtcagctc

SEQ ID NO: 960 - DNA, 526 bp, Homo sapiens
tttttttttacatggaaatattccatgggatttatttttaacaaacatttacataaacaataaatgaaaaaaaaacaggtttaaagtgagcagattcatatttacagtgtgatttttaaggactgtctatatccaaattttattttcgtgaacgcttacattctaagagcagtacaattagcctattacgtagggccctaatcttgttagtatagtgttgttgaaatactttcttcagcttttgccttaacaaatccaaagatggaagatgatgacaatctggaatattcaacataacatgaaaaaattcattccacatatccaaatgaggaagccttctaaaaagaccttcaggcttacactctcctccttcatttttcactttcatgtaagtgccaaagagcatgcaatatactgttgcagcaaccccaaagtaatcgatctggtagttccatggtttgttgctgagcatctcaacacactgaaaaccagatgtttcacactttgctgtgaatatagttccttt

SEQ ID NO: 961 - DNA, 441 bp, Homo sapiens
  misc_feature (1)...(441): n=a,t,g or c
gcagcagcagacatttattgagctcactgtggccggctcccctcttagcccggtccccacatcgctagttcttatagcgtccctatgaggtgggagctgtcgctccactttgcgtgtgggaagactgaggcaccgaggccatgccaccagcccaaagtacagcagacaggctcagaaacaggaggctgcctgtcctccatccccagggcaggaagtaaggccgagctccaaacccactctgccccagggataggctttaggcaggggaaggatacggccaggtcagcacattagaaagtggggccagacgtggtggctcacgctttgtacccccnacacttttgngaaggccaaggcaggagggatcacttgagggctaggagttcaagaccagcctgggcaacataccaagacccctgtctctacaaaaaaaaaaaaagg

SEQ ID NO: 962 - DNA, 532 bp, Homo sapiens
tttttttttagatgacaagagttagcttttattcacaaatgtagttaaacatgaggggtgttttgtagaaactctaatttctacaaacattagtggtgcattttggtaacattgggacaataaataagttatttaattaataatacaattttaagacaaaagataccccaaacaaagcattatctgttgactgcctgagaaacatgaagatcttcaatgttagtacttttctgctccttctttcttaggtgatcatccattggctttcttctactaggttgtctgccaagacttgggtctgaaggctgaagtgaaggccctttcagaaatgcattctggatgccatccttagttccacgcaagaaatgggctaaaatcccatataaaagaggtattgtattatcctttgattcttcaaatgcatttagttcatggatgagaaactgtctgtccaacgaactacaggttgaccagattctgccatgagggacgatgctgtatacttataattggtggaatctaaataccccga

SEQ ID NO: 963 - DNA, 441 bp, Homo sapiens
tatttttatttacaacagaattggtggctttattcctccatctttagggacacttggcattagcagctagatggaaagtccgcagtgaagtcaaactcattctgccccagccacagctccggaagctcattggctcggtccaaccccagttccaccaccagcgacatcagcacttcctcatccactgggtccgaatcgatgatagcagggctctgggcaccagcagaaggagagagtgattctgcccctcccgcctgggccccaaagtcccagttttgcaggggtcctgcctccccgggttggcctggagtggcagcagcatcccctgatactggctattaagtttctgcagctgcatactagccagcaagtgaggggcggggtgcaggttgaaggattgggggtttagtgggaggggtggttgtaggagagctatttgga

SEQ ID NO: 964 - DNA, 354 bp, Homo sapiens
  misc_feature (1)...(354): n=a,t,g or c
gngaacgtcaccggtttaccttcacgtggccattctcctgtccgttcgctttggaaggcncgaggcacagcgnctccccaggcctctccgcggcggcttctcccttcgctgcggtcttggagaactgggcacccatgctggcttcttcaacaaagaaactcaacagatccaagaggggaaaagaagagcctcgggttggtgtaacgacggggcgagcagcaagcagcggcggcggcaacaagcggcagggccacacacaccggagggagggggggttgggggttggtngaaaaggncaagaacagaacccattttaattacacttcccgattaaaaaattttttagttccgagg

SEQ ID NO: 965 - DNA, 172 bp, Homo sapiens
  misc_feature (1)...(172): n=a,t,g or c
tgttcaagaacacttagttcaaagcatcttaatggacgagaaatctgtttccaaaaaatctaaacaaattcagtgtggaaaaggtaaatcaagtaagagtagtaaaaactgtaaactattctttacatgggaaaaataaatnataatcatatttncttaaagtggcaacact

SEQ ID NO: 966 - DNA, 299 bp, Homo sapiens
  misc_feature (1)...(299): n=a,t,g or c
tttaatataaaaataaaactttattctgtctcatcaaaagctaccagctgctgaagcaaacatgaagggtggcgggggggcagggattctagggccccagagtaagtagaccacactgagtctcttttgggccccctgacagganagcgctgagtggaaggggaggagctgggacccaaaggtcttggcttaggtgtgggagcagagaacatnagacctcatcatggtcctaaatctccaaaggctctactggacaaacaagattgatgttaagagagaggggaatgagtgacattgag

SEQ ID NO: 967 - DNA, 531 bp, Homo sapiens
  misc_feature (1)...(531): n=a,t,g or c
ttaactctaaagcactcagcaaggctttggactctttctctgtcttgcttaacttatcattaagttgttcaatgtgatgttctcttttcttcaaaaggtcttgagaacaatctcgctgcttttccagatcagccacagcaagcttcagtttttctaaagtcaaggagttttcttgctgatttatttttttcttgaagatctcttaacatggtttcctgagaggtattcttcgctttcatttcttctgcaaaattctggctctgatttaaacactgtttgatgttcttgaggttctgcctccnggggggcagacttctctgggcccttttgctcaggaggtgactcttaagggagggttggttttcccttccttcatttccctcccatggcttctccctcaggctcattctccctggatctggactcgccggggggaccggcctggttcaggctctgcacaacttttggcttaaactcttccaaatggtctcgngccgaatctggggcncgagggcaaaaatcccaanggga

SEQ ID NO: 968 - DNA, 477 bp, Homo sapiens
  misc_feature (1)...(477): n=a,t,g or c
tttttacantcagaatatttacagaagtatttattttaaaagtagacttaaaaaagaaaagtaatttagattaaaagatccnaggngtattgtttcatgtaggngttactgctaccnatactttcaccccatttattaagcccaaaacacttcaagcaacttcaggntcataaattaataaggaggtacagaagcccaaccaggntgggaaagaatgtgtttcaggttagaaggggacagcatggctcctcaatgatgtcttgtatggnacatttgtgctccactgttaatgaagattttcttcctgaaaatctgaatgtgacattttaggntcctctgggttgttgggtttagnctcccgnattgtaatgggtgtgctgaaggtcaggtgggttgactagaaggtcaatccaagctcctaggctcccctctcttgtagggcctcaattatccacctgtgagggctcagggaggggc

SEQ ID NO: 969 - DNA, 421 bp, Homo sapiens
  misc_feature (1)...(421): n=a,t,g or c
aaaacaattttactccttattcataaaacagtacatttctattacataggtttcatcccctaggcatgcacaaccatttgaactatttaaacagtttataacaaaacaaatgagaagataagggaaaaagagctctcctggggacttacatagctgtttggtttttcaacttgattgaagaaagttattcgggggatctgtccaattcacaccttctgttccctgatcaaatactttagggtcaaacataaggttttattgatttttgctcaagcaaangaattaacatttttgataaggaactgtaatgggcaattataaggtaatatgggtgtatggtaatattatggctgccagaggaaacatttgactatgattaaattcaagcccagtactggggtagctctagataattaaagga

SEQ ID NO: 970 - DNA, 2640 bp, Homo sapiens
aaatagacactttggtttgaaagatgtaaacattccaaccttggaaggtagaattcttgttgaattagatgagacatctcaagagcttgttccagaaaagaccaatgttaagccaagggcaatgaaaactattctaggtgatcaacgaaaacagatgctccaaaaatacaaagaagaaaagcaacttcaaaaattgaaagagcagagagagaaagctaaacgaggaatatttaaagtgggtcgttatagacctgatatgccttgttttcttttatcaaaccagaatgctgtgaaagctgagccaaaaaaggctattccatcttctgtacggattacaaggtcaaaggccaaagaccaaatggagcagactaagattgataacgagagtgatgttcgagcaatccgacctggtccaagacaaacttctgaaaagaaagtgtcagacaaagagaaaaaagttgtgcagcctgtaatgcccacgtcgttgagaatgactcgatcagctactcaagcagcaaagcaggttcccagaacagtctcatctaccacagcaagaaagccagtcacaagagctgctaatgaaaacgaaccagaaggaaaggtgccaagtaaaggaagacctgccaaaaatgtagaaacaaaacccgacaagggtatttcttgtaaagtcgatagtgaagaaaatactttgaattcacaaactaatgcaacaagtggaatgaatccagatggagtcttatcaaaaatggaaaacttacctgagataaatactgcaaaaataaaagggaagaattccttcgcacctaaggattttatgtttcagccactggatggtctgaagacctatcaagtaacacctatgactcccagaagtgccaatgcttttttgacacccagttacacctggactcctttaaaaacagaagttgatgagtctcaagcaacaaaagaaattttggcacaaaaatgtaaaacttactctaccaagacaatacagcaagattcaaataaattgccatgtcctttgggtcctctaactgtttggcatgaagaacatgttttaaataaaaatgaagctactactaaaaatttaaatggccttccaataaaagaagtcccatcacttgaaagaaatgaaggtcgaattgctcagccccaccatggtgtgccatatttcagaaatatcctccagtcagaaactgagaaattaacttcacattgcttcgagtgggacaggaaacttgaattggacattccagatgatgctaaagatcttattcgcacagcagttggtcaaacaagactccttatgaaggaaaggtttaaacagtttgaaggactggttgatgattgtgaatataaacgaggtataaaggagactacctgtacagatctggatggattttgggatatggttagttttcagatagaagatgtaatccacaaattcaacaatctgatcaaacttgaggaatctgggtggcaagtcaataataatatgaatcataatatgaacaaaaatgtctttaggaaaaaagttgtctcaggtatagcaagtaaaccaaaacaggatgatgctggaagaattgcagcgagaaatcgcctagctgccataaaaaatgcaatgagagagagaattaggcaggaagaatgtgctgaaacagcagtttctgtgataccaaaggaagttgataaaatagtgttcgatgctggatttttcagagttgaaagtcctgttaaattattctcaggactttctgtctcttctgaaggcccttctcaaagacttggaacacctaagtctgtcaacaaagctgtatctcagagtagaaatgagatgggcattccacaacaaactacatcaccagaaaatgccggtcctcagaatacgaaaagtgaacatgtgaagaagactttgtttttgagtattcctgaaagcaggagcagcatagaagatgctcagtgtcctggattaccagatttaattgaagaaaaccatgttgtaaataagacagacttgaaggtggattgtttatccagtgagagaatgagtttgcctcttcttgctggtggagtagcagatgatattaatactaacaaaaaagaaggaatttcagatgttgtggaaggaatggaactgaattcttcaattacatcacaggatgttttgatgagtagccctgaaaaaaatacagcttcacaaaatagcatcttagaagaaggggaaactaaaatttctcagtcagaactatttgataataaaagtctcactactgaatgccaccttcttgattcaccaggtctaaactgcagtaatccatttactcagctggagaggagacatcaagaacatgccagacacatttcttttggtggtaacctgattactttttcacctctacaaccaggagaattttgaatttaaaaataaatccaaacattttccttcatattatcaatgcttatatattccttagactattgaaattttggagaaaatgtatttgtgttcacttctatagcatataatgttttaatattctgtgttcatcaaagtgtattttagatatactctttctcaagggaagtggggatattttgtacattttcaacacagaataaaaaatgtactgtgccttg

SEQ ID NO: 971 - DNA, 3784 bp, Homo sapiens
ggcggaagcacgatctccggcagcggcctgggaactcttagctgagcaggcgagagcatcatggataccgacttatatgatgagtttgggaattatattggaccagagcttgattctgatgaagatgatgatgaattgggtagagagaccaaagatcttgatgagatggatgatgatgacgacgacgatgacgtaggagatcatgacgatgaccaccctgggatggaggtggtgctgcatgaggacaagaagtactacccaacagccgaggaggtgtatggtcctgaggtggagaccatagttcaagaggaagacactcagcctctcacagaacccattattaagccagtgaaaaccaagaaattcactctgatggagcagacattacctgttacggtgtatgagatggatttcttggcggatctgatggataactcagagctcatcagaaatgtgaccctttgtggacatctccaccatggcaagacatgttttgtggattgtttaattgaacagactcacccggaaatcagaaagcgctatgaccaagatctgtgctatactgacatcctcttcacagagcaagagagaggtgtaggcatcaaaagcactcctgtgacagtggtcttgccagacaccaaaggaaaatcttatctcttcaatatcatggacactccaggacatgtgaatttctctgatgaggtcacagctggcttgcgcatctcagatggagtggtccttttcattgatgctgctgagggggtgatgctgaacacagagcggctgatcaagcatgcggtgcaggagaggctggcagtcactgtgtgcatcaacaagattgaccggctgatcctggagctgaagctgcctccaactgatgcttattacaagctgcgccacattgtggatgaggtcaatggattaataagcatgtattccactgatgagaacctgatcctttccccactcctgggtaacgtctgcttctccagctcccagtacagcatctgcttcacgctgggctcctttgccaagatctatgccgacacctttggtgacattaattaccaagaatttgctaaaagactctggggtgacatctacttcaaccctaagacgcgaaagttcaccaaaaaggccccaactagcagctcccagagaagtttcgtggagtttatcttggagcctctttataagatcctcgcccaggttgtaggtgacgtggacaccagcctcccacggaccctagacgagcttggcatccacctgacgaaggaggagctgaagctgaacatccgccccttgctcaggctggtctgcaaaaagttctttggcgagttcacaggctttgtggacatgtgtgtgcagcatatcccttctccaaaggtgggcgccaagcccaagattgagcacacctacaccggtggtgtggactccgacctcggcgaggctatgagtgactgtgaccctgatggccccctgatgtgccacactactaagatgtacagcacagatgatggagtccagtttcacgcctttggccgggtgctgagtggcaccattcatgctgggcagcctgtgaaggtactgggggagaactacaccctggaggatgaggaagactcccagatatgcaccgtgggccgcctttggatctctgtggccaggtaccacatcgaggtgaaccgtgttcctgctggcaactgggttctgattgaaggtgttgatcaaccaattgtgaagacagcaaccataaccgaaccccgaggcaatgaggaggctcagattttccgacccttgaagttcaataccacatctgttatcaagattgctgtggagccagtcaacccctcagagctgcccaagatgcttgatggcctgcgcaaggtcaacaagagctatccatccctcaccaccaaggtggaggagtctggcgagcatgtgatcctgggcactggggagctctacctggactgtgtgatgcatgatttgcggaagatgtactcagagatagacatcaaggtggctgacccagttgtcacgttttgtgagacggtggtggaaacatcctccctcaagtgctttgctgaaacgcctaataagaagaacaagatcaccatgattgctgagcctcttgagaagggcctggcagaggacatagagaatgaggtggtccagattacgtggaacaggaagaagctgggagagttcttccagaccaagtacgattgggatctgctggctgcccgttccatctgggcttttggccctgatgcgactggccccaacattctggtggatgatactctgccctctgaggtggacaaggctcttcttggttcagtgaaggacagcatcgttcaaggtttccagtggggaaccagggagggccccctctgtgatgaattgattcggaatgtcaagtttaagatcctggatgcggtggttgcccaggagcccctgcaccggggcgggggccagatcatccccacagccaggagagtcgtctactctgccttcctcatggctactcctcgtctgatggagccttactactttgtagaggtccaggcccctgcagattgcgtctctgcagtttataccgtcctggccaggcgcagggggcacgtgactcaggatgcacccatcccaggctcccctctgtacaccatcaaagcttttatcccggccatcgactcttttggctttgagactgatctccggactcacacccagggacaagccttttctctgtctgtcttccaccactggcagattgtgcctggtgatcccctggacaagagcattgtcatccgccccttggagccacagccagctcctcacctggcccgggaattcatgatcaaaacccgccgtaggaagggcctcagtgaagatgtgagcatcagcaaattcttcgatgatcctatgttgctggaacttgccaaacaggatgttgtgctcaattaccccatgtgagtgcgtggactcctgggagctcctgctccctacagtgggctgcaactcctgtacttgaagctgagacctcatatgacgtggccttcgtgttgtcagagagtgtctggaagctgctgttgccatcttgaacaactcaccaacctccaacccagagccccagtgagagaggagcatttggcctcctgcttccttctgtggcctctgccgggctccattcccaaggaaaagagaggagcttgggctcacagaaagagaaggggatgaaaccccaaggggccctatctttgggatttacatggaattttattttctacaagtttgaccttagccatggtttgcaagtgaacagaacattctgacctctgtcttgctctgctcctttcatcctcgtctcccctgccccatctggtgcttacattctgaatatatgtcatctcccaagaggcttcactgcctctgcttccagctgcagcctccttcctgcctgggtccccagggaagccgcctgccttttaattcagtgttcccatgagcgccaaggccccattattgcccccttgctcccactccatgctgcttctgggtgggacctaagatggcttgggagttgttgggttcctgcgatcagaagtctaccccaccacctcctcaggaaactgctgcctcccctaagaatcttccttgccctggagtagggggccagagcactttgatttccagccatttactccaagtcctctccccagctaccaccagtcccttactctgttctcccccagtgaaaaagagtctgttgattttcctc

SEQ ID NO: 972 - DNA, 6942 bp, Homo sapiens
ggcatggaacctaaagactagaggcggttgtgtgagtcaggaagaggggccagatatctgagtgttcctctttagtttcttcaattgcagataatatggtgtctaattttatgttgttcaggaaagacagtggttcctgactcaggaagacagtctcagaaacatgtggaatgatattgagctgctaacaaatgatgataccggaagtgggtacctgagtgtcggttcaagaaaagaacatggaactgctttatatcaagtagatttgctagtgaagatctcttctgaaaaggcctcattaaatccaaagatacaggcatgcagcttaagtgatgggtttattattgtagccgaccaatcagtgatattgcttgacagtatttgtagatcacttcaattgcatcttgtctttgatactgaagtggatgtagttggcctttgtcaagaaggaaagtttcttttggttggcgagagaagtggcaacctacatcttattcatgtaacatcaaaacaaacactactcactaatgcatttgttcagaaagctaacgatgaaaatcggcggacttaccagaatcttgtcattgagaaggatggttcaaatgaaggtacctattatatgctacttcttacatacagtggatttttttgtattacaaaccttcagcttttaaaaattcaacaagcaattgagaatgtagacttcagtacagcaaaaaagttacaaggacaaatcaagtccagttttatttctactgaaaattatcatactcttggttgtctcagtcttgtggctggagatttagcaagtgaagttcctgtgataattgggggaaccggtaattgtgcattctcaaaatgggaaccagattcttccaagaaaggaatgacagttaagaaccttattgatgcagagattattaaaggtgcaaagaagttccagctgatagacaatctactttttgttcttgatactgataacgtgctgagtttatgggatatttacactctaactcctgtatggaactggccctctcttcacgtagaagagtttcttcttactacagaagcagactctccttcatcagtcacgtggcaaggaattacaaatctcaaattaatagctctgacagcttcagctaataagaagatgaaaaacctcatggtttattcattacctacaatggaaatactatattctttggaagtatctagtgtttcttctctggtccaaacaggaattagcacagataccatataccttttagaaggagtttgcaaaaatgatccaaaattgtctgaagactcagtctctgtgttagtactcagatgtcttacggaagctttaccagaaaacagattgagtcggttacttcacaaacacagatttgctgaagctgagagttttgccattcagtttggactagatgttgagcttgtttacaaggtcaagtcaaatcatatattggagaaactggcattgagttctgtggatgccagtgaacagaccgaatggcaacaacttgtagacgacgctaaggaaaatctacataagatccaggatgatgaatttgtggtgaattactgcctgaaagctcagtggataacctatgaaaccactcaagagatgctgaattatgccaaaaccaggcttttgaagaaagaagataaaactgctctcatttattctgatggcttgaaagaggtgctaagagctcatgcaaaattgactactttttatggagcatttggaccagaaaaattcagtggcagttcttggattgaatttctaaataatgaagatgatcttaaagatatttttttacagctaaaagaaggaaaccttgtttgtgcacagtatctttggcttcgacatcgggcaaactttgaaagcagatttgatgtgaaaatgctggagagcttgctcaactcaatgtctgcatcagtctctttgcaaaagctgtgtccatggtttaaaaatgatgtgattccatttgtaagaaggactgtgcctgaaggacagataattcttgcaaaatggttggaacaagcagccaggaaccttgaattaactgataaggcaaattggccagaaaatggacttcaattggcagagatattttttacagcagaaaaaacagacgagttgggattggcatcttcctggcattggatttccttgaaagattatcagaacacagaggaagtatgtcagctaaggactttggtaaataacttgcgagagttgatcacgttgcataggaagtacaactgcaaattagccctctctgattttgagaaggaaaatacaaccaccatagtgttccgaatgtttgataaagtgctggccccagagcttattccctccatcttagagaagtttataagagtttacatgagagaacatgacttgcaagaggaggaacttctcttgctgtacatagaggatttactgaatagatgcagctcaaagtccacatcactctttgaaacagcatgggaagcaaaggccatggcagtaatagcgtgtttatctgacacggacctcatatttgatgccgtgctcaagatcatgtatgcggcagtggttccttggagtgcagctgtggagcaactggtgaaacagcacctggaaatggaccatcccaaagtcaagttattacaggaaagttacaaactaatggagatgaaaaaacttttacgaggctatggaataagagaggtaaatctcttaaacaaggaaataatgagagtggttagatacattctcaaacaagatgtcccatcttctttagaagatgctttaaaggtagcccaagcgtttatgttatctgatgatgagatctacagtctaagaattattgacctgattgatagagaacagggtgaagactgtctccttctgttgaagtctttgcctcctgctgaagctgagaaaactgcagaaagagtcatcatatgggcacgactggcattacaagaagagccagatcattctaaagagggcaaggcctggagaatgtctgtagcgaagacatccgtggacattcttaagatactatgtgacattcagaaagacaatctgcagaagaaggacgaatgtgaagaaatgttgaaactatttaaagaggttgctagcttacaggagaactttgaggtctttctttcatttgaagattatagcaatagttccctggtagcagatctccgtgagcagcacattaaagctcacgaagttgcacaggcgaaacacaaacctgggagcaccccagagcccatagctgctgaggtgaggagcccaagcatggaatcaaagctgcacagacaggcactggccctgcagatgtccaaacaagagctggaggcagagctgaccttgagagccttaaaagatgggaacatcaaaacagcactgaaaaaatgcagcgacttgtttaagtatcactgcaatgctgacactgggaaattgctatttctgacatgtcagaagctttgtcagatgttggctgataatgtcccagtgacagtgcctgtgggactgaatcttccttccatgatacatgatctagcaagccaagctgccaccatttgcagtccagattttttactagatgctttagaactatgtaaacatactttaatggctgtagagctttccagacaatgccaaatggatgactgtggaatcctcatgaaagcttcttttgggacacataaagatccatatgaagagtggtcttacagtgacttcttcagtgaagatggaattgttcttgagtcacagatggtgcttccagtgatttatgaactgatttcatctcttgtgcctctagctgaaagcaagagatatcccttggagtctaccagtttgccatactgctcccttaatgaaggagatggccttgttttacctgttataaattccatctctgccctgcttcagaatcttcaggaatctagccagtgggagctagccctaagatttgtggttggttcatttggtacctgtcttcagcactctgtgtcaaacttcatgaatgccactttgagtgaaaagttatttggagagactacattagttaaatcaaggcatgttgttatggaattgaaagaaaaagctgttatatttatcagggaaaatgctacaacactactgcacaaagtatttaattgtcgcttggtagatcttgacctggcgttgggttactgcactctcttacctcaaaaagatgtgtttgaaaatctctggaagctcatagataaagcatggcagaattacgacaaaatcttggcaatatctctggtgggctctgagctggcaagtctctatcaggaaatagaaatggggcttaagttccgtgaactcagtactgatgcccagtggggcattcgtcttggtaaacttggtatttcttttcaaccagttttcaggcaacattttctcaccaagaaagacctcattaaagctcttgtggagaatatagatatggacacaagcctcattttggaatattgcagcacatttcagttggactgcgatgcagttcttcagctcttcattgaaacgctgctccacaacacaaatgccggccaaggccagggagatgcaagcatggactctgcaaagcggcggcatcccaaactcctggccaaagcccttgagatggttcctttactgacgagcacaaaagatttggtcatcagtcttagtggaatactacataagctggatccttatgactatgaaatgattgaagttgtcttgaaagttatagaacgagctgatgaaaagataaccaatattaatattaatcaggcattgagtattctgaaacatttgaagtcatacagaagaatttctcctcccgtggatctagaatatcagtatatgttggaacatgtcataactttgccatcagctgcccaaactagactgccttttcacctgatattctttggcacagcacagaacttctggaaaattctctctacagaactcagtgaagaatctttcccaacattgctcttaatttcgaaattaatgaagttctctctggacactctgtacgtgtctacagcaaaacacgttttcgaaaaaaaactgaagccaaagctcctgaagttaacacaagctaaatcctcaacactgattaacaaggaaataactaagatcacgcagaccatcgaatcctgcttactctctatagtcaacccagagtgggctgtagctattgccatcagccttgcccaggatatccctgaaggttccttcaagatatctgctttgaaattctgcctttatttagctgagagatggctacagaatatcccatcgcaggacgaaaaacgtgaaaaagccgaggctttgttgaagaagcttcatatccagtaccggcgatcgggcacagaagctgtgctcatagcccacaagctgaacactgaggaatatttaagagtgatcggaaagccagcacatcttattgtcagtctctacgaacatcctagcatcaatcaaagaattcagaattcatctggcacagattatcctgatattcatgcagcagctaaagaaatagccgaagtcaatgaaattaatttggaaaaagtctgggacatgttgttggaaaaatggctatgcccttcaacaaaacctggtgaaaaaccatcagaattatttgaacttcaagaagatgaagccctacgaagagtgcagtatctcctcctgtctcgtccaattgattatagttcaagaatgctgtttgtatttgcaacatcaactacaaccacattaggtatgcatcagttaacttttgcccatagaactcgagctcttcagtgtctcttctatttggctgacaaggaaactatagaatctctctttaaaaaacccattgaagaagtgaaatcttatttgagatgtataacttttctggcatcatttgagactttgaatatccccatcacatatgaattattttgcagcagtcctaaagaaggaatgattaagggtctgtggaaaaaccacagccacgagtccatggcagtaagattggtgactgagctgtgtttagaatacaaaatctatgacctgcagctttggaatggactcttgcaaaagcttctgggcttcaatatgattccttatctaaggaaagttttaaaagccatctccagtatccattctttatggcaggttccctacttcagcaaagcgtggcagcgtgtgatacagataccactgctttcagcctcttgtcctttaagtcctgatcagctgtcagattgttctgagagtctcatcgctgtcctcgaatgtccagtctcaggtgatcttgacctgatcggagtcgccaggcagtatatccagttagaacttccggcttttgcattagcttgtctgatgctcatgccccactcagagaaaagacaccagcaaattaagaattttctgggttcctgtgaccctcaggttattttaaagcaattggaagagcatatgaacacgggccagctagcaggattttcacatcaaattagaagtctgattttgaataatatcatcaataagaaggagtttgggattttggcaaagaccaaatactttcaaatgttgaagatgcatgcgatgaataccaacaatatcactgagctagtgaactatttggcaaatgacttaagtttagatgaagcttcagtcttgataactgaatattcaaagcactgcgggaaacctgtgcctccagacactgctccctgtgaaattctgaagatgtttcttagtggattatcgtaaatcactgaacctttttttcaagaaggacaagaattttggagtctgctattaatggaccatatttattacagtttttaaattgtacaatctctgtattatagctatttgtctaacattaccccacatgtaataaataaaacaatatgagc

SEQ ID NO: 973 - DNA, 3371 bp, Homo sapiens
tttctcccaacgtgttcttttttttcctcttcattctccctccttcgaggacacaaaagtggcttccgcggaaagatttggaggcggtgggagcttttctccccggagagcgactgtgtagaaaggatttttgggaagccgctttttaacacctctgctctccgtcccccaagcctctgtgtaatcctctgaggagaaaagcccatagcttgaaagttcgggggcattttgttgtgttctgtaggagagagggggaggaccctgttcgggtagtttggccggactggtactggccgttggaaaacccgaagtacatttccgtgtggaacttttgcagatatatatttttagatttttaaataccagataaaaaatatatgccttctatatatctcctggcgacctgcccctgacagcgcgatgtacaatacggtgtggagtatggaccgcgatgacgcagactggagggaggtgatgatgccctattcgacagaactgatattttatattgaaatggatcctccagctcttccaccaaagccacctaagccaatgacttcagcagttccaaatggaatgaaggacagttctgtttctcttcaggatgcagaatggtactggggggatatttcaagggaggaggtaaatgacaaattgcgggatatgccagatgggaccttcttggtccgagatgcctcaacaaaaatgcagggagattatactttgactttgcggaagggaggcaataataagttaataaagatctatcaccgggatggtaaatatggcttttctgatcctctgacatttaattccgtggtggagctcattaaccactatcaccatgaatctcttgctcagtacaatcccaaacttgatgtgaagctgatgtacccagtgtccagataccaacaggatcagttggtaaaagaagataatattgatgcagtaggtaaaaaactgcaagaataccactctcagtatcaggagaagagtaaagagtatgataggctgtatgaagaatatactagaacatcccaggaaatacagatgaagaggactgcaatagaagcttttaatgaaacaattaaaatatttgaagagcagtgtcacacacaagaacaacatagcaaagaatatattgagcgatttcgcagagaggggaatgaaaaggagattgaacgaattatgatgaattatgataaattgaaatcacgtctgggtgagattcatgatagcaaaatgcgtctagagcaggatttgaagaaacaagctttggacaaccgagaaatagataaaaaaatgaatagtatcaaacctgacctgatccagctgcgaaagatccgagatcaacaccttgtatggctcaatcacaaaggagtgagacagaaacgcctgaatgtctggctgggaattaagaatgaggatgctgatgagaactattttatcaatgaggaagatgaaaacctgccccattatgatgagaaaacctggtttgttgaggatatcaatcgagtacaagcagaggacttgctttatgggaaacctgatggtgcattcttaattcgtgagagtagcaagaaaggatgctatgcttgctctgtggtggccgatggggaagtgaagcactgtgtgatctacagcactgctcggggctatggctttgcagagccctacaacctgtacagctctctgaaggagctagtgctccattaccagcagacatccttggttcagcacaacgactccctcaacgtcaggcttgcctaccctgttcatgcacagatgccctcgctttgcagataaagaggaagtgggaagagaggtggtcttctggcatttttttctacagtttttattagactacgatgagggcattctttctacatagactgcttgttttgcacaagaagtgattttgtgaatgtgaagtggagaggccgaggagcagccggccgggatgggggcattagaggcctgaggttctctaggactcagccatgccgctgcactgacatactaagctggaagcagatgttttttttgaaagtctgtttcattggggtttttgttttgtttagccagacaccctcaacagaatattaggcttgatggttatagcgggtggggttgtatttggaagcctctgaagagaccatgtctttttaaaatctaactcttgagagtgcagcaggggcatggctctgctgggagttgtgttttgctttggcagtctctcttccccccacgaagaaggctgtttaggttttgtgatagaatgggatttgatgaaaaagacaaccaaaggaaaatggggaggcttgggatttcatttaaataatctaagccaagatgataaaaaaaaccttcaactgaaggtactttgtttcttacaacataatttaggcttcagcatctcaccagcccctccctctgaagaagtattatgttcagaagccaacaaaacagtttgttgccagaccaatgtttgatgggaaaacgtggcactcatagttgaatgtatacttctgtaccaaaacttgaacataaaagactagaatttgtgagttttagcaaacgctaaattgatcactgtaactaaccccttctgtccttcctgcctgtttctctgagatgaggaatagcattctttttgtggggatggtgagctttgaatcataaaatgaagttggtgcttgtatggtgtttccttagcctaaagaatgatctgttgtttgaaacctttgtaacttgtttgtatgagtaaagaaaaggtgcaatgcagtgcttttagatggcttgatataccaaataacaatatagacaacattattatatgtgcttccccaagtttaaaggccctgcagaaatagtaaacatggtttaatttcccttcatttccccctcctttgctggatggggttttgggagctataggttgctaaggaggggagtcagattgtggtcaggtgcctcagtaaatcacagacccaggggccctgtggtccagggtgagagtcacaccacattacacatgtgcttccatacagtggtttctgaagcttttgcagggagagaagatggcttagtgtttagactgttagtagaagccatctggaagcttttctctttgcctttttttgtgatcctgccattaaggctatgtgcagtctgccctcctgctccagtggccttgattttaggccaggaatcttctgctccatgtggcttaagccttccagctgagtgaagctaggcaaatggagtgggggcaggcatctattcctgcccccatcatgccccacacccatcagtcaacactcatttgacaaatagagtccagctgcctctgagccaatcctgggacctaa

SEQ ID NO: 974 - DNA, 2637 bp, Homo sapiens
aacatttacaacaaagttgattctgtgtagggttggaggctagacagttccacaaatttttagtcacattttccatgtcagttaaatctagggagttcaagactactggaaaaattagtctcattactaaaagaaacttagagaccgagggaggtaccagagtctaggaggtacctctgggttgcagaagtaattgtaaaataccagacctgttctttttactaaaagctagtttcactatcttctggtctgaaatactgaggcaaatactcaagacttattttcttcctaatcttgctggtgaaacagaagttactagaaagaaaggaagaaaaaacttgatttggtgactgcaggaagcaacacgttgctgcttttattctacagataatgatttatgaggaatccaagatgaatttggagcaggagaggccgtctgtctgcagtgccccaggctgctcccagcgcttcccaacagaggaccatctgatgattcataggcacaaacatgaaatgactttgaagtttccttcaataaagacagacaatatgttatcagatcaaactccgaccccaacgagattcctgaagaactgcgaggaggtgggcctcttcagcgagctggactgctccctggagcacgagttcaggaaggctcaggaagaggagagcagcaagcggaatatctcgatgcataatgcagttggtggggccatgacggggcccggaactcaccagcttagcagcgctcggctgcccaaccatgacaccaacgttgtgattcagcaagccatgccgtcgcctcagtccagctctgtcatcactcaggcaccttccaccaaccgccagatcgggcctgtcccaggctctctatcttctctgctacatctccacaacagacagagacagcccatgccagcctccatgcctgggaccctgcccaaccctacaatgccaggatcttccgccgtcttgatgccaatggagcgacaaatgtcagtgaactccagcatcatggggatcgaaggtccaaatctcagcaacccctgtgcttctccccaggtccagccaatgcattcagaagccaaaatgaggttgaaggctgcattgactcaccaccctgctgccatgtcaaatgggaacatgaacaccatgggacacatgatggagatgatgggctcccggcaggaccagacgccacaccatcacatgcactcgcacccgcatcagcaccagacactgccaccccatcacccttacccacaccagcaccagcacccagcacaccatcctcaccctcaaccccatcaccagcagaaccatccacatcaccactcccattcccaccttcatgcacacccagcacatcaccagacctcgccacatccgcccctgcacaccggcaaccaagcacaggtttcaccagcaacacaacagatgcagccaacccagacaatacagccaccccagcccacaggggggcgccggcgaagggtggtagacgaggatccggacgagaggcggcggaaatttctggaacggaaccgggcagctgccacccgctgcagacagaagaggaaggtctgggtgatgtcattggaaaagaaagcagaagaactcacccagacaaacatgcagcttcagaatgaagtgtctatgttgaaaaatgaggtggcccagctgaaacagttgttgttaacacataaagactgcccaataacagccatgcagaaagaatcacaaggatatctaagtccagagagtagccctcctgctagtcctgtcccagcttgctcccagcaacaagtcatccagcataataccatcactacttcctcatcggtcagcgaggtggtaggaagctccaccctcagccagctcaccactcacagaacagacctgaatccgattctttaaaatgcaccatcagacctggcctccaagaagagctgtagcgtaccatgcgtcctttcttttaagggcatttttagaattaactcagacctggaagactcctcagttcttcaaagactggctttcatttttatagttattatggaaatgttgtcttttatacttagttatataagaaaaagggagttatgcaattaatatctatcagcttgggaaacgctttggtgcttttctccagttttctggtaccagttacttgtttataaactgaaccttttctgtatatagccatggtttcattcttatcagtccaaccctttgcctgaaacattgaatcttgttaaaccacagcttttagctaaaatgaggtatacctagatgtcaagtaagacagatccaaggtaactgggtaggaaatcttttgacatcttaactcatgttgagtttgtgctgtggtgtcaccagaattccagataaacacacagcctttcccatacctttttttttcttactataaaatattataagatccattgatgtccaaataataccaccgagcatctcttcacctctcctcctcttggtccacttgctaatgcccagttttcttctccatttccactttttcttaggctccctatttactattcattttgacttccttctgttttatttttttccctttagcattgcatgtgaataagaaaataatgtttaaagaaa

SEQ ID NO: 975 - DNA, 4167 bp, Homo sapiens
cccgcctaatcttcacccgctgctaggctcgtttaatgagtcttctgagagctaaggagtcctcggattcattcaaagcattctacaatgaacgctaggggggaaaaagaacaaacaaaatacatttcaaatataggattcaattacttttcactactcaatgatgtgtcaaaggcacgctgtgttttgttttgagggcggggagatgacaggagggaatcctgggcccccattggctcgccgctcgccgctgcagttgagctccagccgctccgagagcattattgatctgaagggtaaatgtggagggagccacagagaggggtccaggcttttctgagaagagaggcagcctcttccaggaagaaagtggtgtctactggctgcccggcctggagaaccttctttgaatgaaaacggacaaaatgcaaagcagtgcgttggcacagtgatttggaaaggggaaacagaagagaagggtctcaccttccgcgcaaggctgagctgttggcaccctgctgcggccgtcggtgctgctgctcctgcagctgccttttctgccatcagctttgttacctaacagcttggctcttttgggaatatagacaagctggaacccaggagcagttgggagttttaaagaatgccagcctttttaaagctttgatgtccagtgctatagaatcaagttactgtggaggtcaaaacaatttgagatacataagctggccttagaaaataaattgcctctaacttacagtgaggagctcaacataacagggaaaaggagcacaggatgcagctacttggagggtgttgattgaaaacttcgatctccccaccccattcacggttgatttgacggatttctcaccttgttcacagagaaaatttcaattaaggcccctttagatggaatataatacagcagaagccttttcatcaaaaggattaatgcctgcatcatcatttctgcaataaaacaagaagctaagtggtggaggccacagacacctcaaacctggattccacaattctacgttaagtgttggagtttttattactctgctgtaggaaagcctttgccaatgcttacaaggaactgtttatccctgcttctctgggttctgtttgatggaggtctcctaacaccactacaaccacagccacagcagactttagccacagagccaagagaaaatgttatccatctgccaggacaacggtcacatttccaacgtgttaaacgtggctgggtatggaatcaattttttgtgctggaagaatacatgggctccgagcctcagtatgtgggaaagctccattccgacttagacaagggagagggcactgtgaaatacaccctctcaggagatggcgctggcaccgtttttaccattgatgaaaccacaggggacattcatgcaataaggagcctagatagagaagagaaacctttctacactcttcgtgctcaggctgtggacatagaaaccagaaagcccctggagcctgaatcagaattcatcatcaaagtgcaggatattaatgataatgagccaaagtttttggatggaccttatgttgctactgttccagaaatgtctcctgtgggtgcatatgtactccaggtcaaggccacagatgcagatgacccgacctatggaaacagtgccagagtcgtttacagcattcttcagggacaaccttatttctctattgatcccaagacaggtgttattagaacagctttgccaaacatggacagagaagtcaaagaacaatatcaagtactcatccaagccaaggatatgggaggacagcttggaggattagccggaacaacaatagtcaacatcactctcaccgatgtcaatgacaatccacctcgattccccaaaagcatcttccacttgaaagttcctgagtcttcccctattggttcagctattggaagaataagagctgtggatcctgattttggacaaaatgcagaaattgaatacaatattgttccaggagatgggggaaatttgtttgacatcgtcacagatgaggatacacaagagggagtcatcaaattgaaaaagcctttagattttgaaacaaagaaggcatacactttcaaagttgatgcttccaaccttcaccttgaccaccggtttcactcggcgggccctttcaaagacacagctacggtgaagatcagcgtgctggacgtagatgagccaccggttttcagcaagccgctctacaccatggaggtttatgaagacactccggtagggaccatcattggcgctgtcactgctcaagacctggatgtaggcagcagtgctgttaggtacttcatagattggaagagtgatggggacagctactttacaatagatggaaatgaaggaaccatcgccactaatgaattactagacagagaaagcactgcgcagtataatttctccataattgcgagtaaagttagtaaccctttattgaccagcaaagtcaatatactgattaatgtcttagatgtaaatgaatttcctccagaaatatctgtgccatatgagacagccgtgtgtgaaaatgccaagccaggacagataattcagatagtcagtgctgcagaccgagatctttcacctgctgggcaacaattctcctttagattatcacctgaggctgctatcaaaccaaattttacagttcgtgacttcagaaacaacacagcggggattgaaacccgaagaaatggatacagccgcaggcagcaagagttgtatttcctccctgttgtaatagaagacagcagctaccctgtccagagcagcacaaacacaatgactattcgagtctgtagatgtgactctgatggcaccatcctgtcttgtaatgtggaagcaatttttctacctgtaggacttagcactggggcgttgattgcaattctactatgcattgttatactcttagccatagttgtactgtatgtagcactgcgaaggcagaagaaaaaagacaccctgatgacctctaaagaagacatcagagacaacgtcatccattacgatgatgaaggaggtggggaggaagatacccaggctttcgacatcggggctctgagaaacccaaaagtgattgaggagaacaaaattcgcagggatataaaaccagactctctctgtttacctcgtcagagaccacccatggaagataacacagacataagggatttcattcatcaaaggctacaggaaaatgatgtggatccaactgccccaccatacgattcactggccacatatgcctacgaagggagtgggtccgtggcagagtccctcagctctatagactctctcaccacagaaaccgaccaggactatgactatctgacagactggggaccccgctttaaagtcttggcagacatgtttggcgaagaagagagttataaccctgataaagtcacttaagggagtcgtggaggctaaaatacaaccgagaggggagatttttaaaaaagaaaaagaaacacaaatattaatagaaatctctctcacacacacacacacacacaaacacacacacacacacacactctttctgggacaagattcctttgattacctggtttctagtaagttactaaattaatcatattgtcagttttggtttattctgccaacacgagatacatcctataatgtgtacttgctttgttttgttgttttgttttttcacaatcacactgagacaagctcaggcctattcaatacaatttactgacatgacaacctagaacgaagatagctatgtggcatcacggtggaagagtgttagatttttcttaattccactaaagtgcctattgaaactcttatcatttaaagtggtgtacagtacactctgctgtgatggtattgcgggattcagagataaagacataaaacaaagacaccgtctttatgtcaagaagcaatagcgacactctgactctcctcattccttttgagaacaaaagaagaacactttctgatctccaccttcttctaattcaaaaggttttctttttcttttttaaactgtatgctaaaacgtatttgtttatcctatcctttcagaaaattgaaataaatatgaaaatatcaagttcaatatgtaagtccc

SEQ ID NO: 976 - DNA, 2585 bp, Homomo sapiens
  misc_feature (1)...(2585): n=a,t,g or c
cagtgaaggacatgccagtgagatcaggtggcctgcttccagatcctcctagaagtagttacttggaaagtccaagaggcccaagatttgatggtcctcgaagatttgaggatttagggtcaaggtgtgaaggaccgagacccaaagggcctcgttttgaaggaaatcgccccgatgggccaagacccagatatgaaggtcacccagcagagggcactaaaagcaagtggggaatgattccccgggggtcagcatctcaattttatattacccccagtacatccctaagtcctcgacagagtggaccacagtggaaaggccccaaaccagcttttggacagcagcatcagcagcaacctaagtcacaagcagaacctctttcaggaaacaaagaaccattagcagacaccagtagtaaccagcagaagawttttaaaatgcaatcagctgcattttccattgctgcagatgtaaaggatgtcaaggcggctcagtcaaatgagaatctaagcgactctcaacaagagccacctaaaagtgaagtctcggaagggcccgtagagccctctaattgggaccagaatgttcaaagtatggagactcaaatcgacaaagcccaagctgttactcagcctgtaccccttgcgaataagcctgtacctgctcaatctacttttccttcaaaaacaggggggatggagggaggaacagcagtagcaacatcatcattaacagcagataatgattttaaacctgtgggtattggtctaccccattcagaaaacaaccaagataaaggcctgcctcggccagataatagagataatagattagaaggcaatagaggcaacagctcatcttacagaggtcctgggcaaagcagaatggaagacacacgggataaaggtcttgtaaacagaggtcgcgggtaggcaatcagtcgagggccaggattggtcaagcaagaagacttcgggataagatgatgggtagaagagaagatagtcgagagaagttgaacagaggagaaggtacccgggacagagggttgttgagccctggaaccagtcgggagaaagtgccaggtggtcttcaagggagccaggacaggggtgcagctggcagccgagaaaggggaccacctcggagggctggcagtcaggagaggggacctcttcgaagggctgggagtagagagagaataccaccccgaagagctgggagcagggagagaggaccacctcgagggcctggcagtcgagaaaggggactgggaagatcagattttggtcgtgatagaggtccattcagaccagaaccaggagatggtggggaaaaaatgtatccatatcaccgggatgagcctcctagggctccatggaaccatggagaagagcgagggcatgaagagtttccattagatggtagaaatgctccaatgggaacgagaaagactcgatgactgggatagagagagatactggagagaatgtgaacgtgactatcaagatgatacactagagctctataacagagaggacaggttctcagcaccaccatctcggtctcatgatggagataggcgaggcccttggtgggatgattgggagagagaccaggatatggatgaggactacaatagggaaatggaaagggacatggacagggatgtggatcggatttcaagacctatggatatgtatgatagaagtttggataatgagtgggacagagattatgggagaccactggatgaacaagaatcacagtttcgtgaacgggatattccatctcttccacctttaccgcccctcccacctcttccacctttggatagatatcgggatgatagatggagagaagaaagaaatcgagagcatgggtatgatcgagatytccgtgataggggtgagttgaggattcgagagtatccagaaagaggagatacatggcgggaaaagcgagattatgttcctgacagratggactgggaaagagracggttgtcagacagatggtacccatctgatgtggatagacattcccccatggcggaacatatgccctcctcacatcattcctcagaaatgatggggtccgatgcaagcttagactctgaccaaggccttggaggggtaatggttctcagtcagaggcagcatgaaatcrttttgaaagctgcacaagaactgaaaatgyttcgggaacgagaaagaacagcttccaaagatgaaagacttcgggtctgagccacagatggctgaccatctaccacctcaggaatccaagattgcagaatrcatcttcaagacctggaatgtatccgcctccagggtcgtatagacctcccyctcctatgggcaaaccaccaggttcaattgtaagaccctctgctccaccagcaagatcatctgttcctgtgaccaggccacctgtcccaataccnaccaacctccacctcctccacctctacctcctcctcctccagtgataaagccacaaacttcagctgtagaacaggaacgatgggatgaagattctttctatgggctctgggatacaaatgatgaacaaggactgaattc

SEQ ID NO: 977 - DNA, 1709 bp, Homo sapiens
caatttgagtttccatttctcggatttgggaactggtataagcattgtctgtgatgtaaacaaagtcttcaatatttggagaaaacatctcctcatacttgagagcacaagaggaagagagagaccctcactgctggggagtccctgccacactcagtcccccaccacactgaatcggaattccgagagggaagaggaggcgcgagaatggaggtggaggccgtctgtggtggcgcgggcgaggtggaggcccaggactctgaccctgcccctgccttcagcaaggcccccggcagcgccggccactacgaactgccgtgggttgaaaaatataggccagtaaagctgaatgaaattgtcgggaatgaagacaccgtgagcaggctagaggtctttgcaagggaaggaaatgtgcccaacatcatcattgcgggccctccaggaaccggcaagaccacaagcattctgtgcttggcccgggccctgctgggcccagcactcaaagatgccatgttggaactcaatgcttcaaatgacaggggcattgacgttgtgaggaataaaattaaaatgtttgctcaacaaaaagtcactcttcccaaaggccgacataagatcatcattctggatgaagcagacagcatgaccgacggagcccagcaagccttgaggagaaccatggaaatctactctaaaaccactcgcttcgcccttgcttgtaatgcttcggataagatcatcgagcccattcagtcccgctgtgcagtcctccggtacacaaagctgaccgacgcccagatcctcaccaggctgatgaatgttatcgagaaggagagggtaccctacactgatgacggcctagaagccatcatcttcacggcccagggagacatgaggcaggcgctgaacaacctgcagtccaccttctcaggatttggcttcattaacagtgagaacgtgttcaaggtctgtgacgagccccacccactgctggtaaaggagatgatccagcactgtgtgaatgccaacattgacgaagcctacaagattcttgctcacttgtggcatctgggctactcaccagaagatatcattggcaacatctttcgagtgtgtaaaactttccaaatggcagaatacctgaaactggagtttatcaaggaaattggatacactcacatgaaaatagcggaaggagtgaactctcttttgcagatggcaggcctcctggcaaggctgtgtcagaagacaatggccccggtggccagttagagcagagacttcactgactgacttacaggtgccctattctgaggtacaggagccgcggctttctgatgggggaaaatgcgccttaggctgagccaacatgactgtcccccaaactccagtggctggccaggcgcggtagtcacgcctgtaatcccaacactttgggaggccgaggcaggtggatcacctgaggtcagaagttcaagaccagcctggccaacatggggaaaccctgtctttactaaaaatataaaaattagctgggtgtggtggcgggcacctgtaatcccagctactcgggaggctgtggcaggcgaaatcgcttgaacccaggaggaggaggtggaggttgcagtgagccaagatcacaccattgcactccagcctgggcgacagagactccatctggggaaaaaaattaaataaataaactcccg

SEQ ID NO: 978 - DNA, 4320 bp, Homo sapiens
ccggactcgaggtggccgatgtgacagcatgggggtggactttgatgtgaagactttctgccacaacttgcgggcgactaagccaccatacgagtgcccggtggagacctgccgaaaggtctacaagagttacagtggtattgagtaccacctgtaccactatgaccacgacaacccaccacccccacaacaaactccactccgcaagcacaagaaaaaggggcgccagtcacgcccagccaacaagcagtcacccagcccctcagaggtctcacagtcaccaggccgtgaggtgatgagctatgcacaggcccagcgcatggtggaggtggacttgcatggccgcgtccaccgcatcagcatctttgacaacctggatgtggtgtcagaggatgaggaagcccccgaggaggcccctgagaatggcagcaacaaggagaacactgagacaccagctgctactcccaagtcaggcaaacataagaacaaggagaagcgcaaggactccaaccatcaccaccaccacaatgtttctgcgagcaccactcccaagctgccagaggtggtctatcgggagctggaacaggacacccctgatgccccaccccggccaacttcctattaccggtacatcgagaagtctgcagaggagctggacgaggaagtagagtatgacatggacgaggaggactacatctggctggatatcatgaatgagcgtcggaagacagagggtgtaagtcccatcccgcaggagatctttgagtacctaatggaccgactggagaaggagtcgtactttgagagtcataataaaggcgaccctaatgcgctagtggacgaggatgctgtttgctgtatctgcaatgatggtgagtgccagaacagcaatgtcatcctcttctgtgacatgtgcaacctggaagtgcaccaggagtgctacggtgtcccctatatccctgagggccagtggctgtgccgccgttgcctgcagtcaccctctcgtgctgtggattgtgccctgtgccccaacaagggcggtgccttcaagcagacagatgacgggcgctgggcccatgtggtgtgtgccttgtggatccctgaggtctgcttcgccaacacggtcttcctagagcctattgacagcattgagcacatcccaccagctcgctggaagctcacctgctacatttgcaaacaacggggctcaggggcctgcatccagtgccacaaggccaactgttacacagctttccatgtgacatgcgcccagcaggctggcctttacatgaagatggagcctgtgcgggagacaggcgccaacggcacctctttcagtgtccgcaagacagcctactgcgacatccacacgcctccaggttcagcacgccgactgcctgccctgtcccacagcgagggtgaggaggatgaagatgaggaggaggatgagggtaagggctggagctcagagaaagtcaagaaggccaaggccaagtcccggatcaaaatgaagaaggcacggaagatcctggcagagaagcgggcagcagcacctgtggtgtcagtgccctgcatcccaccacacaggcttagtaaaatcaccaaccgcctgaccatccaaaggaagagccagttcatgcagaggctgcacagctactggacactgaagcggcagtcacggaatggggtcccattgctacgtcgcctgcagacacacctgcaatctcagaggaactgtgaccaagttgggagagattctgaggataagaactgggcccttaaagaacagctcaagtcctggcagcggctccggcatgacttggagcgagctcggctgctcgtggaattgatccgcaagcgggaaaaactcaaaagggagacgatcaaggttcagcagattgccatggagatgcagctgactcctttcctcatcctccttcgcaaaaccttggagcagctccaagagaaggacacaggcaacatcttcagcgagccggtccctctgtctgaggtacctgactacctagaccacatcaaaaagcccatggactttttcaccatgaagcagaacttggaggcttaccgctacctgaattttgatgattttgaggaggacttcaacctcatcgtcagcaactgcctcaagtataacgccaaggacaccatcttctaccgggcagcagtgcggcttcgtgagcagggtggtgctgtcgtccgccaggcccggcgccaggcagaaaaaatgggcattgactttgagacgggcatgcatatcccccacagcctggctggagatgaggccacacaccacactgaagatgcagccgaggaagagcggctggtcttgctggagaaccagaagcacctgccagtggaagaacagctaaagctgcttctggagcggctggacgaagtgaatgccagcaagcagagtgtgggccgctcacggcgtgcaaagatgatcaagaaagagatgacggcactgcggcggaagcttgcccatcagcgagagacgggacgtgatggccctgagcggcatggcccctcgagccggggtagtctgacaccccacccggcagcctgtgacaaggatgggcagacagatagtgcggcagaggagagcagcagccaggagacaagcaaaggcctgggtcccaacatgtcctcaacccccgcacatgaggtgggcaggagaacctcagttctgttctccaaaaagaacccgaagacagctggaccgcccaagaggccgggccggccccccaaaaaccgggagagccagatgacccccagccacggaggcagtcctgtggggcccccccagctccccatcatgagttccctgcgtcagcgcaagcggggtaggagcccccggcccagttcgagctcagacagcgacagtgataagtccacagaagaccccccaatggacttaccagccaatggcttcagcggtggaaaccaaccagtgaagaagagtttcttggtataccgtaatgactgcagccttccccggagcagctcagactctgagtccagcagcagtagcagtagcagcgctgcttcagaccggaccagcacaacgccctcaaaacaaggccggggcaaaccctccttctctcggggcactttcccagaggacagcagtgaggatacctcaggcactgagaatgaggcctactccgtgggcactggccgcggcgtgggccacagcatggtaaggaagagtctgggccggggagctggctggctgtcagaggatgaggactccccgctggatgctctggacctcgtgtgggccaaatgccgaggctatccatcatacccagctctgatcattgatccaaagatgccccgagaaggtatgttccaccatggggttcccatccctgtgcccccactggaggtgctgaaacttggggagcagatgacccaggaagcccgagagcatctctacctcgtcctcttctttgacaacaaacgaacctggcagtggctgcccaggaccaagctggttcctctgggtgtgaaccaggacctagacaaggagaagatgctggagggccgcaagtccaacatccgcaagtcagtacagatcgcctaccacagggctctgcagcaccgcagcaaggtgcaaggcgagcagagcagtgagaccagcgatagtgattgatactgctcaacacagcccaacctatagtgccctgtgacttctctcctcccctttgctcactgtcctggagtggcaccggcctctgcactgactcatttctggtcttggggccagtctcaggggaagctgggtgggggaggtccctcctgccctaagtgcagctggactgtacagaacactccaagggccaatggcagttcagcgcaaggagagggagggcccacaggtcagaaaaagctccagagacctcacagcattgtagggcggggtggtgggccaaagttaggacactgcgtaaaacaggccatcccaccacctctacctgctcatgccaggagaatccataactgcctagagcctggggccctaccggtcgtgaggtgagtgggcatctgtccagcctggaagaggggcactaggtgactccctcccctgctgttgtaaatactgtaattatcggagaatttaaattattctcatttgtaactgcgtttccgggtcgcgccagagtcatttggtactaaaaaaaaaaagactgggggctgtccccatttcccttctctttcccatagattcccccacctttcaaactggtttgtatttatttcaaaggaagaaaatatattgattcttagaaaataaaaaaa

SEQ ID NO: 979 - DNA, 2197 bp, Homo sapiens
tttataagcagtttacaactacttggcatcactagctcagaagctcaaaatgtatatacaaagaaatgattagaatttatcttaactgaaagcactagtttaaacagcctagagtcttgtagaaattgttatccaaaacatgcagaggcagcaagagttgcccaaaaccacattatctatactttatatgcttttctgttaaagattgaagcaatgtgaagtggatggaaatatttgcttaaaagaacaaaatgaattaacacagcatagatgactaataaaaaccttgggtttatgccatacacttcaaactcaaggcaaagtccagtagtggctcatgttctgggtttttagaaagcaaatgaaaatatttggaaagatcaatatatttcaacagaagagccataaatgccctgaaagcagaaagttgacacaattttaaatagaattcagttgaattaaacaggaccttgcctcaagaaataatctaccaacaattaacttgttttaaagcaaagttaggaagtgagcatgttcaaattattaaataaaaaagtaagctgtgtatttcattcatagaaatagaggctggcctacttcggatgattctcagcatgtgattacagatgtgggcttatacatcctagggagttaaggcgtactctggcttggatagagtagagctctttgaaactcttctctcacccagctagtttatatagactagagaactagaatgtagcagcatactctgtcttagaagcccttttatatggagctggtctggaaggtttgaaaacataacaaatgtgttggtgtctcccaatgtattgctagattcttacccaagagcattatcctggttagggtttggtttggttttgttttgtttttaatgatgaaccacaaactaacactagatgttagttctttcatcaagtgaggagagtagaagaaaagtccagaactctgaaacaccttttcaaaagtttttcaagccatgatgtttcgaagttaaatgctctgttatgtaagcaatataatcagtttttattaatgtaacattccttagtgttttggggtatcacacaaaaaagaatatccatatctggaagcaacagcttttaaataagagcattgtggtggtggtggtgatagtggtttttttttttttttttgagttggagtctcgcacagttgcccaggttggagtgcagtggcacgatctcagctcgcttcaacctctgctcccaggttcaagcaattcttctgcctcagcctcctgagtagctgggattataggcacctgctaccatgcctggctgatttttattattttagtagagacaggtttcaccatgttggccaggctggtcttgaactcttaacctcaggtgaatcacccacctcggcctcccaaagtgctggaattacaggcatgaaccaccatggccagccaaataagagcatttttaatgtaaaattatgcatgaaatgtacattcaattttgtctttgtttactaggatccatgttctcacaagctatgaagaaatggtgcaaggaaatactgatgaggccgatctgtcactgttgtttccaggagagaatgggagacaatcctagacttccaccataatgcagttacctgtaggcataattgatgcacatgatgttcacacagtgagagtcttaaagatacaaaatggtattgtttacattactagaaaattattagttttccaatggcaataacccatttatgagagtgttttagcctactggaatagacagggaccacatcctctgggaagcagataaggacatagaactgatacttgatgcacactcgtagtggtaactcatccctaatcagcattgtaaagcaggtgccagaggtggtttgctttgtccttccaaagcaggtgagtcagccccaccgagagccaggcagctttgagtggcagcgtggtgctagcagcttcagcggaacagggtgagagttaattatgcagtcttcttgacagcggcattaatttggaaggaaactgacaagtcatgggtcaagtttcagtgacttcctccttcctctgatggcagtatatagttttcacattttaattcctcctcctgagatgcactatacttaaaaccattctctcccctgctaacagaagggtgtgaatctggtttacttt

SEQ ID NO: 980 - DNA, 2333 bp, Homo sapiens
acaactgtctgctgcgcccgaaaaacaagtcggtgcgctggggacccggggccggggccgccttactccggcctagccccgcggccctcggtgcgggctccagggcatgctcggtaccccccgcggctccagcccagacgccccggcctcaggtctcggcccccgcttggggccccggccgtgcggcgcgagggagcggccggatggagcggaggatgaaagccggatacttggaccagcaagtgccctacaccttcagcagcaaatcgcccggaaatgggagcttgcgcgaagcgctgatcggcccgctggggaagctcatggacccgggctccctgccgcccctcgactctgaagatctcttccaggatctaagtcacttccaggagacgtggctcgctgaagctcaggtaccagacagtgatgagcagtttgttcctgatttccattcagaaaacctagctttccacagccccaccaccaggatcaagaaggagccccagagtccccgcacagacccggccctgtcctgcagcaggaagccgccactcccctaccaccatggcgagcagtgcctttactccagtgcctatgacccccccagacaaatcgccatcaagtcccctgcccctggtgcccttggacagtcgcccctacagccctttccccgggcagagcaacggaatttcctgagatcctctggcacctcccagccccaccctggccatgggtacctcggggaacatagctccgtcttccagcagcccctggacatttgccactccttcacatctcagggagggggccgggaacccctcccagccccctaccaacaccagctgtcggagccctgcccaccctatccccagcagagctttaagcaagaataccatgatcccctgtatgaacaggcgggccagccagccgtggaccagggtggggtcaatgggcacaggtacccaggggcgggggtggtgatcaaacaggaacagacggacttcgcctacgactcagatgtcaccgggtgcgcatcaatgtacctccacacagagggcttctctgggccctctccaggtgacggggccatgggctatggctatgagaaacctctgcgaccattcccagatgatgtctgcgttgtccctgagaaatttgaaggagacatcaagcaggaaggggtcggtgcatttcgagaggggccgccctaccagcgccggggtgccctgcagctgtggcaatttctggtggccttgctggatgacccaacaaatgcccatttcattgcctggacgggccggggaatggagttcaagctcattgagcctgaggaggtcgccaggctctggggcatccagaagaaccggccagccatgaattacgacaagctgagccgctcgctccgatactattatgagaaaggcatcatgcagaaggtggctggtgagcgttacgtgtacaagtttgtgtgtgagcccgaggccctcttctctttggccttcccggacaatcagcgtccagctctcaaggctgagtttgaccggcctgtcagtgaggaggacacagtccctttgtcccacttggatgagagccccgcctacctcccagagctggctggccccgcccagccatttggccccaagggtggctactcttactagcccccagcggctgttccccctgccgcaggtgggtgctgccctgtgtacatataaatgaatctggtgttggggaaaccttcatctgaaacccacagatgtctctggggcagatccccactgtcctaccagttgccctagcccagactctgagctgctcaccggagtcattgggaaggaaaagtggagaaatggcaagtctagagtctcagaaactcccctgggggtttcacctgggccctggaggaattcagctcagcttcttcctaggtccaagccccccacaccttttccccaaccacagagaacaagagtttgttctgttctgggggacagagaaggcgcttcccaacttcatactggcaggagggtgaggaggttcactgagctccccagatctcccactgcggggagacagaagcctggactctgccccacgctgtggccctggagggtcccggtttgtcagttcttggtgctctgtgttcccagaggcaggcggaggttgaagaaaggaacctgggatgaggggtgctgggtataagcagagagggatgggttcctgctccaagggaccctttgcctttcttctgccctttcctaggcccaggcctgggtttgtacttccacctccaccacatctgccagaccttaataaaggcccccacttctcccatt

SEQ ID NO: 981 - DNA, 18648 bp, Homo sapiens
tcaagatcagcctgggcaacatggcgaaaccccgtctctacaataaatacaaaaaaattatcctggcggagttatgcacgttgtagtcccaactacctgggaggctgaggcgggagaatcacctgagcctgggaggtcgaggctgcagcgagccgagatcggccgctgcattccagcctgggtgacagagcgagaccatgtctcaaaaaataaaaattaaaaaaaaattgttttcattacctcagccctcctcttcctatcccaaggcgtcgaaattccggtcccaccccttcccatggagcccttggcgtctccaggctcctcaagctagtttcggttccgggctcacgcgcgggttctcgaaaatcagctgtttcagtcttgggctagtccactaattggactcctcccctcgtagaaagtgcctacttgaacttctccaccaatcgctgaagctgcaggtgtggtttcggctcagcttgtcccgccctggcggaggggcggagttgcggcggcgccagtgagctcgcagtctgggaagggcttgactgaatggcagccagtgtcggggtggcggctgggaatgggggccgctccggacttccgctgccaactacaagggggcgggtccgaggggggttagccgaagttgtaggcggggcgcgaggttctagtacccgagctcatactagggacgggaagtcgcgaccagagccattggagggcgcggggactgcaaccctaatcaggtacgggccctgagagggtgtgctggggtaggggtgggggtgagagtgagagttcctccgagggaagggcgactggcccaggggttaccccctggagagggtagcttccttccccagattgaaataggagctgtcgcctgctcggtcctcgatcttcttctgtccagcctatctccctaaccctaatgcccctctcccaaaactgccctgcagcttccgagacccggaatctggcattgttatgttggttcggtatctgacgtttttccctctgctctgcattattttttatcttcaccaaaaaacgatgttcaaagatagataaatctaaaaacaaagatagataaatctattacccttgtttcgtaaaaagtataagctactgaaagatgaaacgattgcctaaggtcacacacaaaattcagttcatttcagaaaagcttcttgagtgcaaaatatgtgcctaagaatgagagataatgagaaaaaattgtttcagccccttaacctcagtgtttgcaatccatttggggagaccaggttttttgtttttgttttcatatttgaatctttgctgacttgctcctttaatatcagacacttaaatcctcagatgggactcatcatattttttttgagatggaatcttcactatgttgctcaagcttggtctgcaactcctggctcaagccatcctctcgtcttgttgggcctctcgtcttgtgggcctgcacaaagtgctgggattacaggcatgagccattcatgccctgggcgcaccttggattgcgatgtgtgtgtgttgtgaagcttttttttttggtatcataaaagcaatacagatacatagttttaaaaatcaagcagctactaaaagagttaaaatgaaaatagcccctcccaatccctcccttgttcctgctggaggtagaaaggcagctgatgttattcatgttagtagaagactctcccaccccaagcatttctctttattttgtaataaaatcatgtgacctttttagaccacaaatatgcatgaattctgttctgttaggctcaggctgcaacaagataagtttcagtttcctaaatagacaccagctggcagtgagcagggaacagtggggagaaagatgcatgggacagcctgcttggtgacaggcaaaaaccggtttgttgttcttttagagacagagtcttgctttgtcacccaggctggagtgtagtgatgtgatctctgcttactgcaaccctgcctctgggtacaagccattctcctgcctcagcctcttgagtagctgggattacaggcaacaattttaagtgaagtgaagtttcaggatctcgagcaaagttgtataacctataatcatattcaagattcacaggtcataaacgtgtcatattcttgggattgagcgacccattgcacagcatttagatgtgcttctagaatggagctcctccttcctatatggagggcagtttatatggtgtacttacctgaccaccaaaaagatttggctctaaaaaagcttcaggtggccgggcatggtggttcacccctgtaatccagcactttgggaggcaggtgggcagatcacctgaggtcagaagttcagacagctggacatatggtgaaacctcatctctactaaaaatacaaaaattagactgggcatggtagtgggcgcctgtaatcccagctagtcgggaggctgaggcaggagaatcccttcaactcggacggcagagtttgcagtgaggccgagatcgtgtcactgcagtccagcctgggtgacagagcaagactccatctcaaaaaaagtaaaaaaaaaaaaaagaaaaaaaaaagcttcagagccagcagggatcatgctgtaataaatacttaacatcaacactgatctttaaatgctttagcacaatcaaatataaataacaaacacacacataaatgcaaaataaatgaattagggagatagatgaaataagattgtggaaatagtaatgtttgttaaagctggatggtgatccttgtactattcactctactctagtgtgtatttgaaaattaccattaggctggttatggtggctcatgcctgttaatcccggcattttggaaggctgaggcaggcggattacttgagctcaggagtttagagtctgcctgggcaacatggcaaaatcccatctctacaaaaaattagctggcatgatggcacactcctgtagtcccagctccttgaggggctgaggcagagaatggcttgaacctgagaggctaaagctgcagtgagccaagatcatgccactgcactccagcctgggtgaccaagtgagaccctgtctcaaaaaaaaaaaaaaaaaaaagaaaagaaaattcccattaaagcacaaaggcccacttattgaagctattaaaatacaggttggggccggctgggcatcgcgtcacgcctgtaatcccagcactttggaaggccgaggtaggcgagtcacgagttcaggagatcgagaccatcctggctaacacggtgaaaccccatctctactaaaaatacaaaaaaaaaaatcagccgggcatggtggcgggagcctatagtcccagctactcgggaggctgaggcaggagaatggcatgagcccgggaggcggagcttgcagtgagccaaaatcacaccactgcactccagcctgggcaacagatcgagactccatctgaagaaaaaaaaaatacaggttgggaccacagtggctcatgcctgtaatcctagtactttgggagtccgaagtaggtggatcacctgaggtcaggactttgagaccagcctggccaacatggcaaaaccccatctctactaaaaaatatacaaaaattagctgggcgtggtggtgggtgcctgtaatcccagctactcaggaggctgaggcagaagaatcacaacaaccagggggatggtggttgcaatgagccaagatcatctccacttcactccggcccaggcaaaagagtgagagtcatcttaaaaaaaaaaaaaaaaaaaaaaaaaaaatacagattaggcattcctaatctgaaaaatttggctccaaaatgctccagtcgagcatttcctttgagtgtcatgtgggtgctcaaaaagttagatttttggaccattttcagatttcagagttttggattagggatgctcgactggtaagtaatcgagatattccaaaaatctggacaaatctgaaatccaaaatgcttggaatagcagatactcaactggtagcactccctggaagaatatgcaccaaactgatagcagtggttaccttctggtgaggaggggaaagaaccaagattagcagtaggatcaacatatattttaatgttttctgtatttttattacttgtataatttaaacattttaaattagtaataatgaacaatcatgaaactatggatgatttagtccagcaaaatatccaattgggaaccctcatccttctgcagagcccaaatggcgcagtgggaaatgctgcagaatcttgacagcccctttcaggatcagctgcaccagctttactcgcacagcctcctgcctgtggacattcgacagtacttggctgtctggattgaagaccagaactggtgaggccttcaggaagttgggggaatgaaaaaggtggccttccacttctgggcccccgggatcctggaatcattaatggcaggaaggggttggaaagcctcaggactacagtaacactgcagagacactaatacttcttattcctggtcccaggcaggaagctgcacttgggagtgatgattccaaggctaccatgctattcttccacttcttggatcagctgaactatgagtgtggccgttgcagccaggacccagagtccttgttgctgcagcacaatttgcggaaattctgccgggacattcaggtacttggaacggttgggagtgatggggtagcactgggagcagagcatagaggagtaaggtttggagaatagaatagtacctggaggtggcaagggagacgggaacaaatgtggggaaaggaggacagagtctggacttggggaatcactagcagagagaagggttgcatatacgtgacactgttgggaggatgctatggtgaaaagacaaagggctaagaaccccgaaggaggaggaaatactgtggacattggtggggagggtctagggcaataggtcattgagagtggttgaattggatcaatcctttctgtttacctttctgttagcccttttcccaggatcctacccagttggctgagatgatctttaacctccttctggaagaaaaaagaattttgatccaggctcagagggcccaattggtgaggacaattcagtggtaatgttggaaactcctgaagtagagaggaaccatggaaaggactcagggagttgtctcagaacaggatccccccgacatcctgtggtataatttcaggcctgaacttaaggcatgaaaggccagagttaaaacgtgctcagagcctcttttttcaggaacaaggagagccagttctcgaaacacctgtggagagccagcaacatgagattgaatcccggatcctggatttaagggctatgatggaggttagtagatgtggtaggagttagggttgacagtgttcagcctaacacctccctgagaagcagcctcatcggggtcctctcccctctgcagaagctggtaaaatccatcagccaactgaaagaccagcaggatgtcttctgcttccgatataagatccaggccaaaggtaggaagcacattgaggggctggagaaagataagtgcctgctgagaagccggagctggaagtgaacaggagaaagctccgatgagcagtagtcactgtcagacacaccccactgactacagtcctgctgccgtgcaaagctggaatcgtgctttgtggaggctgagctggaggtgacagctgagagacagtaaattgttgaggaaatgcatggaaaactaacagtgttttatttgagggggtgtctggtccaagatgaccacttcagaatttgcctggagggtcccacaggtgcctgtgctttgcttggtttccctttcttcctccgccacaaaattcctccttcctgactctgactgagaccccagtcaggaaggagaggaaagaacccctggactgactcctgttcccaccatccagggaagacaccctctctggacccccatcagaccaaagagcagaagattctgcaggaaactctcaatgaactggacaaaaggagaaaggtgggaggcagcagaacagaacatgtgggcaacaaggacctgaaaaaatgagggatgttgggaaccctggtaatctagcgctggcttctttctttcttcatccccagttgggtggtggagggtgaaagggagagatgctcaacactcacattatctctttcccaggaggtgctggatgcctccaaagcactgctaggccgattaactaccctaatcgagctactgctgccaaagttggaggagtggaaggcccagcagcaaaaagcctgcatcagagctcccattgaccacgggttggaacagctggagacatggtgagaggtaccaccccaaccctcgtcctcgccatgcgctgtgatttgtaagttgcagtgccctgcatatagcaagagatactgttctctatttgtctctgctccccagaatagagccctgctccctgcctgactgcagctctattctgcctcctcagcctcaccacgcagggaagcccagaagtcccagtctccttcagggaaaggaatgaattaacccacaatctggttttgcttcttttttttaatcacccagaaatatatatatatgtattttttttttactgcaacgaatacaatgacaagaaaggaagggaaggaaggaaggaagagaaaattacctattacctagcttattaaacaaaaatggaatcatattgtccatactattttgaaatccatggggttttttttaagcttaacagtattttatatatatatatatatatatatatatatatatatatatatatatatatatattttttttttttttttttttttttttttttgagacggagtctctctctgttccctggctggcggagcggagtcggcacgatctcagctcactgcaacttccaactcccacggttcaagccaattctcctgtctcagcctcccgagcctgggattaccaggcacacaccagcctggctagtttttttgattttttagtagagacgatgtttctccatgttggccaggctggtctcaaactcctgacttcaggtgatccacccaacttgggctcccaaagtgctgggattacaggcgtgacgaccatgcccggccaacagtatattatatttatccatgttatttcttatgtccacacaacagtcccctatatggtggtaacataatttaattaatgaactcctattttcagctatttaggttattttcaatttcttgttaccttttgccaggaaacgtatattttatggtaattatattgtgttgtagaaaaatcactagtctagtccaacttgcttgaaaaatagctactttttaactattttctcatttaaaaatttattataatttagtcttttagaaatataccaggccaggcatggcgtctcatgcctgttatcctagtactttggaaggctgaggacggaggatcacttcagtcttggggtttgagaccagcccgggaaacataacaagaccccatctctacaaaaaaaaaaaattgtttttaattaggcatgtccgacacagtggctcacacatgtggccagcactgtgggaaggccaaggtgggtggatcacttgagggtcaggagttcaagaccagcctggccaatgtggtgaaaccccatctctactaaaaatacaaaaatttgccaggtgtggtggcgcatgcctgtattcccagctactcaggaggctaaggcaggaaatcacttgaactcggaggcagaggttgcagtgagctgtgacaatgccactgtactccagcctgggtgacagagcgagctccgtctcaaaaaaaaaaaaaaaagattaggcatggtggcacacgcctgtagaccctagctactcaggaggctgaggtgggaggattgcttgagcccaggtgttggaggctgcagtgagccatgattataccactgtagtccagcctggacaacagaacgagaccctgtctctaaaagtatatatgtacacataccataatacccagctactgaggaggctgaggcagaaagagtgcttgagtccaggagtttgatgtcagcctgagcaatatagcaagaccctcacctcttaaaaaaatttaaagtagattaaaaaaataccacaattgctcaggtagattaaaaaaataccacaattgctcaggtagattattgaaaaacaggcatatagtacttatggtacaggaccagcatgcatgcatgcatgcattgattgattgattgattgattgattgagacagggtctctctctgtctcccaggctggagtgcctggccttaagtgatctgcccacctttgcttcccaaagtgctgagattacaggtgtgagccaccatgtcagctggcgaggctttttaaaagatagttccaagtgttacagctcttttaggatttgtctagcaggctttcaggtttttgccagaaaccacccccacccccaccaaaaaaaaaaaaaaaaaaaagatatgtacaagttcccagatagtgttcccaactgaatctatttctcatgtgtagtgtatggttgttttcctgtcaccacattgctgattattattatttttaattatagagacagtaaagtacagtagttaaaaatgtgagttggggctgggtgcagtggctcacacctgtaatcccagcactttgggaggccaaggtgggcggatcacctgaggtcaggagttcaagaccagcttggccaacatggcaaaaccccgtctcgactaaaaatatatatatataagttagccgggcgtggtggcaacattacctgtaatcccagctactcgggaggccaacaggcaggagaatctcttgaatccaggaggtggaggttgcagtgagccagatcacaccattgcactccagcctggatgacaagagagtgagactgtctaaaaaaaaaaaacaaagtgtgagttgtacaatgagactgcctgggatcacatacaagcttcatcccttactagttgtattgaccctaaagcaagtcactaacctttctgtgccctccagttttatcatctgtaatgtggggaaaataatagtacctgcctcagagggttgttttgaggattaaatgcattaatatgtggaaagggcttaatataagttgtacatagcatatgaaaactgttatgttaaatctattagcagttttatatgtgaaaatagctttgattttcatttcttggattatgaatcatgttgaataatcctttatatgcttcctggattctttttttttcttccccccagtcagtttctgactcttctcatatttatagagagatcttggaacctggatgggggaatccaggaaactcatggattccttcttcctgaattttatcacccaggttcacagctggagcaaagctgttgtttcacctgaggcagctgctgaaggagctgaagggactgagttgcctggttagctatcaggatgaccctctgaccaaaggggtggacctacgcaacgcccaggtcacagagttgctacagcgtctgctccacaggtctagaggccaggcaggaaccctgggggaaagaaggaacaagggaagccattcttacacatactgagctatatattctctccacacctctctctcctcgagcctttgtggtagaaacccagccctgcatgccccaaactccccatcgacccctcatcctcaagactggcagcaagttcaccgtccgaacaaggttggcattccagaactcattcccacttcctttttccaaccctgccactgtgtattttctggctttacagctactgcccactcttggctttttcagtctttcctgaatctccctacctcgttgataccccatcgtcctctttttcaaacacctagcctatacaaaagccgactccgaccacatttccctataccccttgacttccccaggctgctggtgagactccaggaaggcaatgagtcactgactgtggaagtctccattgacaggtaaattggagcaggtgaagggtggccaggacacgggctgctggggtggaggagatactcactcttcacaacagggccctagggctatatccttcctccttccaatcctacctcacagaaattataattcatttcttttgttgaacacttactttgtgacatgcagcatgtcagctactcatttaattgtcacaccaaccccatgaataaactattaccagtgcactgtacaaacaaagatacaggcttagagagactgattacatctcttctcaaggccacatagctagtgagctcaagtcgggtttgaaccgaggtctgtctgatcccaaagacgaaactcctaacttccatactcttttgcccaatgattttttttaaatttatttcttttcaggaatcctcctcaattacaagggtaggtgcttgacaaggacactgcaaacatctgtacagtgtatgacctgcagaaccgggggatttgggaaatggacaaagggagatggcgagatctgaaatggaagtggaacttcagttttttttttttctgctgagtttttacaataattccattccttgtctccatgtatcttcctcctggaacagcttccggaagttcaacattctgacttcaaaccagaaaactttgacccccgagaaggggcagagtcagggtttgatttgggactttggttacctggtaagaatagtttgtgacctatgcttttattactatttttattttttcgagacggagtctcactctgtcccccaggctggagtgcagtggtgccatcttggctcacaggaacctccgccctccccggttcaagcaattcttctgtctcagcctcctgagtacgtagagctataggcagcacaccaccatgcccggctaatttttgtatttttagtagagatagggtttcaccatattggtcgggctggtctcgaactcctgacctcaggtgatccgacccgcctcagcctcccaaagtgctgggatcacaggcatgagccaccatagctggcctgcttttagtccaaaggaacaggggttgggggaagttcccagggcttgagaggtcttgaagccaaacaggggttccagggagactagggtgcccactctggcattttctctccttcccttcaattcacagactctggtggagcaacgttcaggtggttcaggaaagggcagcaataaggtgagatctggacagaggactcgaggcagggggagcttgccaaagagccttctgatgactatgtctttgcctgtcccagaggggccactaggtgtgacagaggaactgcacatcatcagcttcacggtcaaatatacctaccagggtctgaagcaggagctgaaagtgagtgaaaatggagggcaaggagagagaaagcagctttggaagaaggcataagaaggggataaacagaagcctcttggggagggttagcactcctttcctctaacaaatacctgcagctagaaacatcacatccctctctgtgactcctgtcttctccccacacacggacaccctccctgtggtgattatttccaacatgaaccagctctcaattgcctgggcttcagttctctggttcaatttgctcagcccaaaccttcaggtaggggagtggggccgacaggtcccggcgcgagagcaggggtgtggaagcttggtgtgataggttgcttctgagccagcctacactgctcccacccctgcagaaccagcagttcttctccaacccccccaaggccccctggagcttgctgggccctgctctcagttggcagttctcctcctatgttggccgaggcctcaactcagaccagctgagcatgctgagaaacaagctgttcggtacagatttccttttctctcagcctttccccagccttagtcttttctgtccctctgtcctatctatcccaggacccctggcttccctcacatatctgtggctatctgtcccacagggcagaactgtaggactgaggatccattattgtcctgggctgacttcactaaggtaactccctgaatcctgtggagctgctggatctagccccacattccaaatactggccttcccacgtgccctccttccctacaccagaggcaactcctcagcttttgctacctttccattcctccagcgagagagccctcctggcaagttaccattctggacatggctggacaaaattctggagttggtacatgaccacctgaaggatctctggaatgatgggtaaggccttggtcacccttccctcatgggcttgtgcttccgggcttgagagtggagtctctgcaccctcacgtggcaagcagggagagagagcaaagcacggtgcaggccacgtctcctcacatttgttaagaataataaggccgggtgtggtggctcacacctgtaatcccagcactttgggaggccgaggcgggcggatcatgaggtcaggagatcgagaccatcctggctaacacggtgaaaccccgtctctactctaaaaatacaaaaaattagccgggcgtggaggcagacaccctgtagtcccagctactcaggaggctgaggcaggaaaatggcgtgaacctgggagatggagcttgcagtgagccgagattgcgtcactgccctccagccttggggtgacgtagcaagactccgtctcaaaaaaaaaaaaaaaaaacaaccaataatagccataaacagtgtttttgtgaagcactcctacattccagagcttgatgggtgctcttcattaattctctcatctcatccttacaaccatgctgagtggtgggttttgccagcttcatttcatgtgaggaaactgagtttcagagaagttaaagaacttacccaagggacacagttgatattcaaatccaggcctatgtgactccaagcccatgctctttccaccacactgcctaccaacttgtgtagcatttggcttttaaaagtgctattcatgaccaggcacgatggctcacgccttgtaatcccagcattttgggaggccgaggtgggtggatcacctgaggtcaggagtttgagaccagcctggccaacatggcgaaaccccatctctattaaaaatacaaaaattagccgggtgtggtggtgggcgcctgtaatcccagctactcaggaggctgaggaggagaatcgcttgaatttaggagagaaggttacagtgagccaagatcgtgccattgcactccagcctgggtgacagagcaagactctgtctcaaaacaaaaccaaaaaaaagtgctatttgtggccaggcgtggttgctcatgcctgtaatcctagcatttttggggaggctgaggagtacagatcacttgagcccaggagttcaaaactaccctgggccacgtggtgaaaccccaaaccccgtctctacgaaaaatacaaaagttagccaggatgggtggtgtgcacctgtggtcccagctactctggaggctgagaggtggggaagattgcttgagcccgggaggtcgaggtggcagtgagctgtgatcatgccactattctccagcctgggtgacagaatacaccctgtctccctgtctcccagaaaaaaaaaaaagtgctgttcatctgtgtgatctcactgaatcttcgtacttcaaaccctcggaaggtggctattgtcagcaaagtgaagtgacttgtaaaagataaaaaaaagctaagtggcagggcttggtccaaagcctggattccaaacctgggctgtttctccatacaaggggagcagggaggcaggggcctgggggggcagggtgttgggcggtgtcacacgtgacacactgtgctccagacgcatcatgggctttgtgagtcggagccaggagcgccggctgctgaagaagaccatgtctggcacctttctactgcgcttcagtgaatcgtcagaagggggcattacctgctcctgggtggagcaccaggatgatggtagctgctctgccctgccattcccacagcctctcctttctgcctggctctcctctggcccctctgcctgccttgcttcgctggctctgaactgaatgctcagtggtttgggactgggcagccagagagtcagagagctccaaggcccggcctcttccctcaagcccgcctgttcctgcattcactctccagacaaggtgctcatctactctgtgcaaccgtacacgaaggaggtgctgcagtcactcccgctgactgaaatcatccgccattaccagttgctcactgaggagaatatacctgaaaacccactgcgcttcctctatccccgaatcccccgggatgaagcttttgggtgctactaccaggagaaaggtgggaatcgttgacatacttcattgctagattgcagagatctaccagacatccatagatcccactccttcctttaaagcatgggaaaactgatatctagaggaattaagggattcgtccatgggatactgctggttactatggggatgagactgccaggaccatctgcactaggggaaaacctcaggctatatgtctggcccactgatcttctctgcttcttgtatatgttcctcacagttaatctccaggaacggaggaaatacctgaaacacaggctcattgtggtctctaatagagtgagatatgaactgttcattcatcctccctaatccttattggctctgcttcagtgaatcgtcaaaagggggcattaccttctcctgggtggagcaccaggatgatggtcagctgctctgccctgccattcccacagcctctcctttctgccttctcctaagctgcccctattccagtctccccagccttccctccctcctagccccactctagttttttctggttctagtctctcctatctcatatttttctgctgccatccttaggttgtctccacaggggtttctggataataatgatcataatcactggtgttaaggggtacctacttgatgcaagcatggagctttttttttttccagacagggttttgttctgtcgcccaggctggagtgcagtggtgtgatcctggctcactgcagcctcgacctcctgagctcaagcaatacaggcatgcatcaccaaactcagctaattttttttgtattttttgtagagatggggtcttaccatgttgacgcatcaggctgttctgaactcctggactcaagcaatccacccaccttggcctcccaaaagtcagggattacaggcgtgcgaccacaccccgcatatatatatttttttttttttttttttttttttttttttgagacagggtctctgttatccaggctggagttgcagtggataatatgactacgagccttgacctaggggttgaagcaatgctcctgcctcagccaccaagtgctgagactacaggcacacgccaatctacactcaatcacactcagctaattttttaaattttttgtagggatggggtatcactgtgtttgcccaggctggtcttgaactcctggcctcaagcagtctcctgccttggcctcccaaattgccgggattgtaggaatgagccatggcacttggctgggggatagaattttttttttttttttttttttttttttttttgagacagtctcactctcattgcccgggctggagtgcagtggtgcaatttcagctcactgcaacctctgcctcccaggctcaagcaattctcctgcctcagcctatagagtagctgggattacaggcgagcgccacccatgcctggttaatttttgttttttttttgagacagagtctcgccctgttgcccaggctggagtgcagtggcacgatctcagctcactgcaacctctgcctcccaggctcaagcaattctcctgcctcagcctcctgagtactgggactacaagcgcgcacaaccaccacacctggtaatttttgtatttttagtagagacagggttttaccatattggccaggctggtctcaaactcctgacctcatgatccgacccaccttggcctcccaaagtgcagggattacaggcgtgagcctctgcacccggcctaacttttgtatttttagtagaaacagggtttcaccatgttggccaggctggtcatgagctcctggcctcaagtgatctgcccgcctcagcctcccaaagtgcttggattacaggtgtgagccacctggcctgagagtttattatgcgccaggcactaggcaaatggtttgcatttattttctcattttattgaatctacaaaatagtcctgtgaagtaaacactgttactgttttcagctaaggaactggatttagagtagtcaagttttgtacctaaggtacgtggctaatgatacaggtctgttagattccgtagccctgattttaaccaccctactgcctctcaagaattactaggtattgttctcatttatagatgataaatctgaggctcagaaaagttaggccacttgcctaaggtcccccagccaggattcaaactccaggaggcctgattccaaacccatgctctttagccctccgccctactgccttcttagactagcttctgcttattctaccattcctgatttcatttgaaccactgagccctgcccctttgtctgtctttgggtatccaggcaggtggatgaactgcaacaaccgctggagcttaagccagagccagagctggagtcattagagctggaactagggctggtgccagagccagagctcagcctggacttagagccactgctgaaggcagggctggatctggggccagagctagagtctgtgctggagtccactctggagcctgtgatagagcccacactatgcatggtatcacaaacagtgccagagccagaccaaggacctgtatcacagccagtgccagagccagatttgccctgtgatctgagacatttgaacactgagccaatggaaagtaagtgatgagatggagtggcacacattccctttcctacctcttctccctctcccattacagaaaaagctgaactccaagctcctcattggagagaggtccatctgtgattcctttttttaggaattacacatgccttcccccacctccctgctctttcatcccacaagttcccactcaggctcttcccaggcctttcctgccatcctccctcccttgggctgctgggttgggaactcctaactaagatcggggcctcacttttctctctggattacctagtcttcagaaactgtgtaaagattgaagaaatcatgccgaatggtgacccactgttggctggccagaacaccgtggatgaggtttacgtctcccgccccagccacttctacactgatggacccttgatgccttctgacttctaggaaccacatttcctctgttcttttcatatctctttgcccttcctactcctcatagcatgatattgttctccaaggatgggaatcaggcatgtgtcccttccaagctgtgttaactgttcaaactcaggcctgtgtgactccattggggtgagaggtgaaagcataacatgggtacagaggggacaacaatgaatcagaacagatgctgagccataggtctaaataggatcctggaggctgcctgctgtgctgggaggtataggggtcctgggggcaggccagggcagttgacaggtacttggagggctcagggcagtggcttctttccagtatggaaggatttcaacattttaatagttggttaggctaaactggtgcatactggcattggccttggtggggagcacagacacaggataggactccatttctttcttccattccttcatgtctaggataacttgctttcttctttcctttactcctggctcaagccctgaatttcttcttttcctgcaggggttgagagctttctgccttagcctaccatgtgaaactctaccctgaagaaagggatggataggaagtagacctctttttcttaccagtctcctcccctactctgccccctaagctggctgtacctgttcctcccccataaaatgatcctgccaatctaatgtgagtgtgaagtttgcacactagtttatgctacctagtctccactttctcaatgcttaggagacagatcactcctggaggctggggatggtaggattgctggggatttttttttttttaaagagggtctcactctgttgcccaggctagagtgcaatggtgcaatcacagctcactgcagcctcaacctcctgggttcaagcaatcctcctacctcagcctcctgggtagctagcaccatggcatcgccaccatgccctattttttttttttaaagacagggtcttgctatattgcccaggctggtcttgaactgggctcaagtgatcctcacgccttgcctcccaaagtgctgggattataggcatgagccactgtgcttggccaggatttttttttttttttttttgagatggagtttctctcttgttgtccaggctggagtgcaatggtgtgatccggggaattc

SEQ ID NO: 982 - DNA, 1547 bp, Homo sapiens
cctcctaaccagcggccagtgggtttcccataccccaggatgtgagcctctttaacctgtaatgctgtggctagcccttggcccctttcctgccatggagaaccaggtgctggtaattcgcatcaagatcccaaatagtggcgcggtggactggacagtgcactccgggccgcagttactcttcagggatgtgctggatgtgataggccaggttctgcctgaagcaacaactacagcatttgaatatgaagatgaagatggtgatcgaattacagtgagaagtgatgaggaaatgaaggcaatgctgtcatattattattccacagtaatggaacagcaagtaaatggacagttaatagagcctctgcagatatttccaagagcctgcaagcctcctggggaacggaacatacatggcctgaaggtgaatactcgggccggaccctctcaacacagcagcccagcagtctcagattcacttccaagcaatagcttaaagaagtcttctgctgaactgaaaaaaatactagccaatggccagatgaatgaacaagacatacgatatcgggacactcttggtcatggcaacggaggcacagtctacaaagcatatcatgtcccgagtgggaaaatattagctgtaaaggtcatactactagatattacactggaacttcagaagcaaattatgtctgaattggaaattctttataagtgcgattcatcatatatcattggattttatggagcattttttgtagaaaacaggatttcaatatgtacagaattcatggatgggggatctttggatgtatataggaaaatgccagaacatgtccttggaagaattgcagtagcagttgttaaaggccttacttatttgtggagtttaaagattttacatagagacgtgaagccctccaatatgctagtaaacacaagaggacaggttaagctgtgtgattttggagttagcactcagctggtgaattctatagccaagacgtatgttggaacaaatgcttatatggcgcctgaaaggatttcaggggagcagtatggaattcattctgatgtctggagcttaggaatctcttttatggagcttgctcttgggaggtttccatatcctcagattcagaaaaaccagggatctttaatgcctctccagcttctgcagtgcattgttgatgaggattcgcccgtccttccagttggagagttctcggagccatttgtacatttcatcactcagtgtatgcgaaaacagccaaaagaaaggccagcacctgaagaattgatgggccacccgttcatcgtgcagttcaatgatggaaatgccgccgtggtgtccatgtgggtgtgccgggcgctggaggagaggcggagccagcaggggcccccgtgaggctgccgcagggcactgaaagcccaggaccagtaaccaaggagaacaacccacccgtcgcccttctccgtatgctgcctgcgccagaagagctttgctgggccctggcttccctgccctcgccttcaccctctgtcag

SEQ ID NO: 983 - DNA, 2653 bp, Homo sapiens
gagcgcggctggagtttgctgctgccgctgtgcagtttgttcaggggcttgtggcggtgagtccgagaggctgcgtgtgagagacgtgagaaggatcctgcactgaggaggtggaaagaagaggattgctcgaggaggcctggggtctgtgagacagcggagctgggtgaaggctgcgggttccggcgaggcctgagctgtgctgtcgtcatgcctcaaacccgatcccaggcacaggctacaatcagttttccaaaaaggaagctgtctcgggcattgaacaaagctaaaaactccagtgatgccaaactagaaccaacaaatgtccaaaccgtaacctgttctcctcgtgtaaaagccctgcctctcagccccaggaaacgtctgggcgatgacaacctatgcaacactccccatttacctccttgttctccaccaaagcaaggcaagaaagagaatggtccccctcactcacatacacttaagggacgaagattggtatttgacaatcagctgacaattaagtctcctagcaaaagagaactagccaaagttcaccaaaacaaaatactttcttcagttagaaaaagtcaagagatcacaacaaattctgagcagagatgtccactgaagaaagaatctgcatgtgtgagactattcaagcaagaaggcacttgctaccagcaagcaaagctggtcctgaacacagctgtcccagatcggctgcctgccagggaaagggagatggatgtcatcaggaatttcttgagggaacacatctgtgggaaaaaagctggaagcctttacctttctggtgctcctggaactggaaaaactgcctgcttaagccggattctgcaagacctcaagaaggaactgaaaggctttaaaactatcatgctgaattgcatgtccttgaggactgcccaggctgtattcccagctattgctcaggagatttgtcaggaagaggtatccaggccagctgggaaggacatgatgaggaaattggaaaaacatatgactgcagagaagggccccatgattgtgttggtattggacgagatggatcaactggacagcaaaggccaggatgtattgtacacgctatttgaatggccatggctaagcaattctcacttggtgctgattggtattgctaataccctggatctcacagatagaattctacctaggcttcaagctagagaaaaatgtaagccacagctgttgaacttcccaccttataccagaaatcagatagtcactattttgcaagatcgacttaatcaggtatctagagatcaggttctggacaatgctgcagttcaattctgtgcccgcaaagtctctgctgtttcaggagatgttcgcaaagcactggatgtttgcaggagagctattgaaattgtagagtcagatgtcaaaagccagactattctcaaaccactgtctgaatgtaaatcaccttctgagcctctgattcccaagagggttggtcttattcacatatcccaagtcatctcagaagttgatggtaacaggatgaccttgagccaagagggagcacaagattccttccctcttcagcagaagatcttggtttgctctttgatgctcttgatcaggcagttgaaaatcaaagaggtcactctggggaagttatatgaagcctacagtaaagtctgtcgcaaacagcaggtggcggctgtggaccagtcagagtgtttgtcactttcagggctcttggaagccaggggcattttaggattaaagagaaacaaggaaacccgtttgacaaaggtgtttttcaagattgaagagaaagaaatagaacatgctctgaaagataaagctttaattggaaatatcttagctactggattgccttaaattcttctcttacaccccacccgaaagtattcagctggcatttagagagctacagtcttcattttagtgctttacacattcgggcctgaaaacaaatatgaccttttttacttgaagccaatgaattttaatctatagattctttaatattagcacagaataatatctttgggtcttactatttttacccataaaagtgaccaggtagaccctttttaattacattcactacttctaccacttgtgtatctctagccaatgtgcttgcaagtgtacagatctgtgtagaggaatgtgtgtatatttacctcttcgtttgctcaaacatgagtgggtatttttttgtttgttttttttgttgttgttgtttttgaggcgcgtctcaccctgttgcccaggctggagtgcaatggcgcgttctctgctcactacagcacccgcttcccaggttgaagtgattctcttgcctcagcctcccgagtagctgggattacaggtgcccaccaccgcgcccagctaattttttaatttttagtagagacagggttttaccatgttggccaggctggtcttgaactcctgaccctcaagtgatctgcccaccttggcctccctaagtgctgggattataggcgtgagccaccatgctcagccattaaggtattttgttaagaactttaagtttagggtaagaagaatgaaaatgatccagaaaaatgcaagcaagtccacatggagatttggaggacactggttaaag

SEQ ID NO: 984 - DNA, 3743 bp, Homo sapiens
ttgcgggaaagagccaaaccctggcgttggggggcccgggcggggagcccctcccgcggtccacagcgacgcctgcccagccctcctccccttccggctccggcacggggccccgaggcgttcggaggccaggcgggtttctgtcaggcccggggaggaggggcgggcggggcggccgctgcctccccgggacgggccgtaccacgcggacggggaggacggggccaggggactgcagggcggctgcaccgcccgggggcggggtgcggacgggccggcgggctccccggggcggggcgggagggcggggcgtggggcggacggaaccaccggggcggggtgggaggtaacgggacgggcgcgaccatggcgcggtgagggagcgggggtggggatcggtccgggggaggcctgaggccgctggcttgtgcgctgtctccgccgcccccctctttcgccgccgccgccgccgccccgggcatgtcgtccaactgcaccagcaccacggcggtggcggtggcgccgctcagcgccagcaagaccaagaccaagaagaagcatttcgtgtgccagaaagtgaagctattccgggccagcgagccgatcctcagcgtcctgatgtggggggtgaaccacacgatcaatgagctgagcaatgttcctgttcctgtcatgctaatgccagatgacttcaaagcctacagcaagatcaaggtggacaatcatctcttcaataaggagaacctgcccagccgctttaagtttaaggagtattgccccatggtgttccgaaaccttcgggagaggtttggaattgatgatcaggattaccagaattcagtgacgcgcagcgcccccatcaacagtgacagccagggtcggtgtggcacgcgtttcctcaccacctacgaccggcgctttgtcatcaagactgtgtccagcgaggacgtggcggagatgcacaacatcttaaagaaataccaccagtttatagtggagtgtcatggcaacacgcttttgccacagttcctgggcatgtaccgcctgaccgtggatggtgtggaaacctacatggtggttaccaggaacgtgttcagccatcggctcactgtgcatcgcaagtatgacctcaagggttctacggttgccagagaagcgagcgacaaggagaaggccaaggacttgccaacattcaaagacaatgacttcctcaatgaagggcagaagctgcatgtgggagaggagagtaaaaagaacttcctggagaaactgaagcgggacgttgagttcttggcacagctgaagatcatggactacagcctgctggtgggcatccacgacgtggaccgggcagagcaggaggagatggaggtggaggagcgggcagaggacgaggagtgtgagaatgatggggtgggtggcaacctactctgctcctatggcacacctccggacagccctggcaacctcctcagctttcctcggttctttggtcctggggaattcgacccctctgttgacgtctatgccatgaaaagccatgaaagttcccccaagaaggaggtgtatttcatggccatcattgatatcctcacgccatacgatacaaagaagaaagctgcacatgctgccaaaacggtgaaacacggggcaggggccgagatctcgactgtgaaccctgagcagtactccaaacgcttcaacgagtttatgtccaacatcctgacgtagttctcttctaccttcagccgagaccgagagactggatatggggtcggggatcgggacttagggagaagggtgtatttgggctagatgggagggtgggagcgagatcgggtttgggagggctttagcaatgagacttgcagcctgtgacaccgaaagagactttagctgaagaggagggggatgtgctgtgtgtgcaccagctcacaggatgtaaccccaccttctgcttacccttgattttttctccccatttgacacccaggttaaaaaggggttccctttttggtaccttgtaaccttttaagataccttggggctagagatgacttcgtgggtttatttgggttttgtttctgaaatttcattgctccaggtttgctatttataatcatatttcatcagcctacccaccctccccatctttgctgctctcagttcccttcaattaaagagatacccagtagacccagcacaagggtccttccagaaccaagtgctatggatgccagattggagaggtcagacacctcgccctgctgcatttgctcttgtctggattaactttgtaatttatggagtattgtgcacaacttcctccacctttcccttggattcaagtgaaaactgttgcattattcctccatcctgtctggaatacaccaggtcaacaccagagatctcagatcagaatcagagatctcagaggggaataagttcatcctcatgggatggtgaggggcaggaaagcggctgggctcttggacaccctggttctcagagaaccctgtgatgatcacccaagccccaggctgtcttagcccctggagttcagaagtcctctctgtaaatcctgcctcccactaggtcaagaggaactagagtacctttggatttatcaggaccctcatgtttaaatggttatttccctttgggaaaacttcagaaactgatgtatcaaatgaggccctgtgccctcgatctatttccttcttccttctgacctcctcccaggcactcttacttctagccgaactcttagctctgggcagatctccaagcgcctggagtgctttttagcagagacacctcgttaagctccgggatgaccttgtaggagatctgtctcccctgtgcctggagagttacagccagaaaggtgcccccatcttagagtgtggtgtccaaacgtgaggtggcttcctagttacatgaggatgtgatccaggaaatccagtttggaggcttgatgtgggttttgacctggcctcaccttggggctgtttttccttgttgccccgctctagacttttagcagatctgcacccacaggcttttttggaaggagtggcttcctcgaggtgttccacctgcttcggagcctgccacccaggccctcagaactgaccacaggctgctctggccaggagagaaacagctctgttgttctgcattgggggaggtacattcctgcatcttctcaccccctcaaccaggaactggggatttgggatgagatatggtcagacttgtagataaccccaaagatgtgaagatcgcttgtgaaaccattttgaatgaatagattggtttcctgtggctccctccaaacctggccaagcccagcttccgaagcaggaaccagcactgtctctgtgcctgactcacagcatataggtcaggaaagaatggagacggcattcttggacttcactggggctgctggattggatgggaaaccttctggaagaggcagatgggggtcaaaccactgccttgccccaggaaggggccataggtaggtctgaacaactgccggaagaccactacatgacttagggaacttgaaaccaactggctcatggagaaaacaaatttgacttgggaaagggattatgtaggaataatgtttggacttgatttccccacgtcataatgaagaatggaagtttggatctgctcctcgtcaggcgcagcatctctgaagcttggaaagctgtcttccagggttgtaa

SEQ ID NO: 985 - DNA, 1050 bp, Homo sapiens
ggggggggggggcacttggcttcaaagctggctcttggaaattgagcggagacgagcggcttgttgtagctgccgtgcggccgccgcggaataataagccgggatctaccataccattgactaactatggaagattataccaaaatagagaaaattggagaaggtacctatggagttgtgtataagggtagacacaaaactacaggtcaagtggtagccatgaaaaaaatcagactagaaagtgaagaggaaggggttcctagtactgcaattcgggaaatttctctattaaaggaacttcgtcatccaaatatagtcagtcttcaggatgtgcttatgcaggattccaggttatatctcatctttgagtttctttccatggatctgaagaaatacttggattctatccctcctggtcagtacatggattcttcacttgttaagagttatttataccaaatcctacaggggattgtgttttgtcactctagaagagttcttcacagagacttaaaacctcaaaatctcttgattgatgacaaaggaacaattaaactggctgattttggccttgccagagcttttggaatacctatcagagtatatacacatgaggtagtaacactctggtacagatctccagaagtattgctggggtcagctcgttactcaactccagttgacatttggagtataggcaccatatttgctgaactagcaactaagaaaccacttttccatggggattcagaaattgatcaactcttcaggattttcagagctttgggcactcccaataatgaagtgtggccagaagtggaatctttacaggactataagaatacatttcccaaatggaaaccaggaagcctagcatcccatgtcaaaaacttggatgaaaatggcttggatttgctctcgaaaatgttaatctatgatccagccaaacgaatttctggcaaaatggcactgaatcatccatattttaatgatttggacaatcagattaagaagatgtagctttctgacaaaaagtttccatatgttatg

SEQ ID NO: 986 - DNA, 2627 bp, Homo sapiens
gctgacgccttcgagcgcggcccggggcccggagcggccggagcagcccgggtcctgaccccggcccggctcccgctccgggctctgccggcgggcgggcgagcgcggcgcggtccgggccggggggatgtctcggcggacgcgctgcgaggatctggatgagctgcactaccaggacacagattcagatgtgccggagcagagggatagcaagtgcaaggtcaaatggacccatgaggaggacgagcagctgagggccctggtgaggcagtttggacagcaggactggaagttcctggccagccacttccctaaccgcactgaccagcaatgccagtacaggtggctgagagttttgaatccagaccttgtcaaggggccatggaccaaagaggaagaccaaaaagtcatcgagctggttaagaagtatggcacaaagcagtggacactgattgccaagcacctgaagggccggctggggaagcagtgccgtgaacgctggcacaaccacctcaaccctgaggtgaagaagtcttgctggaccgaggaggaggaccgcatcatctgcgaggcccacaaggtgctgggcaaccgctgggccgagatcgccaagatgttgccagggaggacagacaatgctgtgaagaatcactggaactctaccatcaaaaggaaggtggacacaggaggcttcttgagcgagtccaaagactgcaagcccccagtgtacttgctgctggagctcgaggacaaggacggcctccagagtgcccagcccacggaaggccagggaagtcttctgaccaactggccctccgtccctcctaccataaaggaggaggaaaacagtgaggaggaacttgcagcagccaccacatcgaaggaacaggagcccatcggtacagatctggacgcagtgcgaacaccagagcccttggaggaattcccgaagcgtgaggaccaggaaggctccccaccagaaacgagcctgccttacaagtgggtggtggaggcagctaacctcctcatccccgctgtgggttctagcctctctgaagccctggacttgatcgagtcggaccctgatgcttggtgtgacctgagtaaatttgacctccctgaggaaccatctgcagaggacagtatcaacaacagcctagtgcagctgcaagcgtcacatcagcagcaagtcctgccaccccgccagccttccgccctggtgcccagtgtgaccgagtaccgcctggatggccacaccatctcagacctgagccggagcagccggggcgagctgatccccatctcccccagcactgaagtcgggggctctggcattggcacaccgccctctgtgctcaagcggcagaggaagaggcgtgtggctctgtcccctgtcactgagaatagcaccagtctgtccttcctggattcctgtaacagcctcacgcccaagagcacacctgttaagaccctgcccttctcgccctcccagtttctgaacttctggaacaaacaggacacattggagctggagagcccctcgctgacatccaccccagtgtgcagccagaaggtggtggtcaccacaccactgcaccgggacaagacacccctgcaccagaaacatgctgcgtttgtaaccccagatcagaagtactccatggacaacactccccacacgccaaccccgttcaagaacgccctggagaagtacggacccctgaagcccctgccacagaccccgcacctggaggaggacttgaaggaggtgctgcgttctgaggctggcatcgaactcatcatcgaggacgacatcaggcccgagaagcagaagaggaagcctgggctgcggcggagccccatcaagaaagtccggaagtctctggctcttgacattgtggatgaggatgtgaagctgatgatgtccacactgcccaagtctctatccttgccgacaactgccccttcaaactcttccagcctcaccctgtcaggtatcaaagaagacaacagcttgctcaaccagggcttcttgcaggccaagcccgagaaggcagcagtggcccagaagccccgaagccacttcacgacacctgcccctatgtccagtgcctggaagacggtggcctgcggggggaccagggaccagcttttcatgcaggagaaagcccggcagctcctgggccgcctgaagcccagccacacatctcggaccctcatcttgtcctgaggtgttgagggtgtcacgagcccattctcatgtttacaggggttgtgggggcagagggggtctgtgaatctgagagtcattcaggtgacctcctgcagggagccttctgccaccagcccctccccagactctcaggtggaggcaacagggccatgtgctgccctgttgccgagcccagctgtgggcggctcctggtgctaacaacaaagttccacttccaggtctgcctggttccctccccaaggccacagggagctccgtcagcttctcccaagcccacgtcaggcctggcctcatctcagaccctgcttaggatgggggatgtggccaggggtgctcctgtgctcaccctctcttggtgcatttttttggaagaataaaattgcctctctctttg

SEQ ID NO: 987 - DNA, 1649 bp, Homo sapiens
cggcagccagcctattctttggccgggtcggtgcgagtggtcggctgggcagagtgcacgctgcttggcgccgcaggtgatcccgccgtccactcccgggagcagtgatgttgggcaactctgcgccggggcctgcgacccgcgaggcgggctcggcgctgctagcattgcagcagacggcgctccaagaggaccaggagaatatcaacccggaaaaggcagcgcccgtccaacaaccgcggacccgggccgcgctggcggtactgaagtccgggaacccgcggggtctagcgcagcagcagaggccgaagacgagacgggttgcaccccttaaggatcttcctgtaaatgatgagcatgtcaccgttcctccttggaaagcaaacagtaaacagcctgcgttcaccattcatgtggatgaagcagaaaaagaagctcagaagaagccagctgaatctcaaaaaatagagcgtgaagatgccctggcttttaattcagccattagtttacctggacccagaaaaccattggtccctcttgattatccaatggatggtagttttgagtcaccacatactatggacatgtcaattgtattagaagatgaaaagccagtgagtgttaatgaagtaccagactaccatgaggatattcacacataccttagggaaatggaggttaaatgtaaacctaaagtgggttacatgaagaaacagccagacatcactaacagtatgagagctatcctcgtggactggttagttgaagtaggagaagaatataaactacagaatgagaccctgcatttggctgtgaactacattgataggttcctgtcttccatgtcagtgctgagaggaaaacttcagcttgtgggcactgctgctatgctgttagcctcaaagtttgaagaaatataccccccagaagtagcagagtttgtgtacattacagatgatacctacaccaagaaacaagttctgagaatggagcatctagttttgaaagtccttacttttgacttagctgctccaacagtaaatcagtttcttacccaatactttctgcatcagcagcctgcaaactgcaaagttgaaagtttagcaatgtttttgggagaattaagtttgatagatgctgacccatacctcaagtatttgccatcagttattgctggagctgcctttcatttagcactctacacagtcacgggacaaagctggcctgaatcattaatacgaaagactggatataccctggaaagtcttaagccttgtctcatggaccttcaccagacctacctcaaagcaccacagcatgcacaacagtcaataagagaaaagtacaaaaattcaaagtatcatggtgtttctctcctcaacccaccagagacactaaatctgtaacaatgaaagactgcctttgttttctaagatgtaaatcactcaaagtatatggtgtacagtttttaacttaggtttttaattttacaatcatttctgaatacagaagttgtggccaagtacaaattatggtatctattactttttaaatggttttaatttgtatatcttttgtatatgtatctgtcttagatatttggctaattttaagtggttttgttaaagtattaatgatgccagctgccg

SEQ ID NO: 988 - DNA, 1133 bp, Homo sapiens
agtgtaatgttgggtgggagtgcgggacgcctcaaaatgtcttccagtggcaccctcagcaactactacgtggactcgcttataggccatgagggcgacgaggtgttcgcggcgcgcttcgggccgccggggccaggcgcgcagggccggcctgcaggtgtggctgatggcccggccgccaccgccgccgagttcgcctcgtgtagttttgcccccagatcggccgtgttctctgcctcgtggtccgcggtgccctcccagcccccggcagcggcggcgatgagcggcctctaccacccgtacgttcccccgccgcccctggccgcctctgcctccgagcccggccgctacgtgcgctcctggatggagccgctgcccggcttcccgggcggtgcgggcggtggcggtggtggtggaggcggcggtccgggccgcggtcccagccctggccccagcggcccagccaacgggcgccactacgggattaagcctgaaacccgagcggccccggcccccgccacggccgcctccaccacctcctcctcctccacttccttatcctcctcctccaaacggactgagtgctccgtggcccgggagtcccaggggagcagcggccccgagttctcgtgcaactcgttcctgcaggagaaggcggcaggcggcgacggggggaacgggcctggggcagggatcggggccgcgactgggacgggcggctcgtcggagccctcagcttgcagcgaccacccgatcccaggctgttcgctgaaggaggaggagaagcagcattcgcagccgcagcagcagcaacttgacccaaacaaccccgaagcgaactggatccacgctcgctccacccggaaaaagcgctgtccctacaccaaataccagacgcttgagctggagaaagaattcctcttcaacatgtacctcacccgggaccggcgctacgaggtggccaggattctcaacctaacagagagacaggtcaaaatctggtttcagaaccgtaggatgaaaatgaaaaagatgagcaaggagaaatgccccaaaggagactgacccggcgcggtgctggcgggagcgctcaagggcagcggatttgttgttgttgctgtttcctttgtggg

SEQ ID NO: 989 - DNA, 12515 bp, Homo sapiens
ctaccgggcggaggtgagcgcggcgccggctcctcctgcggcggactttgggtgcgacttgacgagcggtggttcgacaagtggccttgcgggccggatcgtcccagtggaagagttgtaaatttgcttctggccttcccctacggattatacctggccttcccctacggattatactcaacttactgtttagaaaatgtggcccacgagacgcctggttactatcaaaaggagcggggtcgacggtccccactttcccctgagcctcagcacctgcttgtttggaaggggtattgaatgtgacatccgtatccagcttcctgttgtgtcaaaacaacattgcaaaattgaaatccatgagcaggaggcaatattacataatttcagttccacaaatccaacacaagtaaatgggtctgttattgatgagcctgtacggctaaaacatggagatgtaataactattattgatcgttccttcaggtatgaaaatgaaagtcttcagaatggaaggaagtcaactgaatttccaagaaaaatacgtgaacaggagccagcacgtcgtgtctcaagatctagcttctcttctgaccctgatgagaaagctcaagattccaaggcctattcaaaaatcactgaaggaaaagtttcaggaaatcctcaggtacatatcaagaatgtcaaagaagacagtaccgcagatgactcaaaagacagtgttgctcagggaacaactaatgttcattcctcagaacatgctggacgtaatggcagaaatgcagctgatcccatttctggggattttaaagaaatttccagcgttaaattagtgagccgttatggagaattgaagtctgttcccactacacaatgtcttgacaatagcaaaaaaaatgaatctcccttttggaagctttatgagtcagtgaagaaagagttggatgtaaaatcacaaaaagaaaatgtcctacagtattgtagaaaatctggattacaaactgattacgcaacagagaaagaaagtgctgatggtttacagggggagacccaactgttggtctcgcgtaagtcaagaccaaaatctggtgggagcggccacgctgtggcagagcctgcttcacctgaacaagagcttgaccagaacaaggggaagggaagagacgtggagtctgttcagactcccagcaaggctgtgggcgccagctttcctctctatgagccggctaaaatgaagacccctgtacaatattcacagcaacaaaattctccacaaaaacataagaacaaagacctgtatactactggtagaagagaatctgtgaatctgggtaaaagtgaaggcttcaaggctggtgataaaactcttactcccaggaagctttcaactagaaatcgaacaccagctaaagttgaagatgcagctgactctgccactaagccagaaaatctctcttccaaaaccagaggaagtattcctacagatgtggaagttctgcctacggaaactgaaattcacaatgagccatttttaactctgtggctcactcaagttgagaggaagatccaaaaggattccctcagcaagcctgagaaattgggcactacagctggacagatgtgctctgggttacctggtcttagttcagttgatatcaacaactttggtgattccattaatgagagtgagggaatacctttgaaaagaaggcgtgtgtcctttggtgggcacctaagacctgaactatttgatgaaaacttgcctcctaatacgcctctcaaaaggggagaagccccaaccaaaagaaagtctctggtaatgcacactccacctgtcctgaagaaaatcatcaaggaacagcctcaaccatcaggaaaacaagagtcaggttcagaaatccatgtggaagtgaaggcacaaagcttggttataagccctccagctcctagtcctaggaaaactccagttgccagtgatcaacgccgtaggtcctgcaaaacagcccctgcttccagcagcaaatctcagacagaggttcctaagagaggaggagaaagagtggcaacctgccttcaaaagagagtgtctatcagccgaagtcaacatgatattttacagatgatatgttccaaaagaagaagtggtgcttcggaagcaaatctgattgttgcaaaatcatgggcagatgtagtaaaacttggtgcaaaacaaacacaaactaaagtcataaaacatggtcctcaaaggtcaatgaacaaaaggcaaagaagacctgctactccaaagaagcctgtgggcgaagttcacagtcaatttagtacaggccacgcaaactctccttgtaccataataatagggaaagctcatactgaaaaagtacatgtgcctgctcgaccctacagagtgctcaacaacttcatttccaaccaaaaaatggactttaaggaagatctttcaggaatagctgaaatgttcaagaccccagtgaaggagcaaccgcagttgacaagcacatgtcacatcgctatttcaaattcagagaatttgcttggaaaacagtttcaaggaactgattcaggagaagaacctctgctccccacctcagagagttttggaggaaatgtgttcttcagtgcacagaatgcagcaaaacagccatctgataaatgctctgcaagccctcccttaagacggcagtgtattagagaaaatggaaacgtagcaaaaacgcccaggaacacctacaaaatgacttctctggagacaaaaacttcagatactgagacagagccttcaaaaacagtatccactgtaaacaggtcaggaaggtctacagagttcaggaatatacagaagctacctgtggaaagtaagagtgaagaaacaaatacagaaattgttgagtgcatcctaaaaagaggtcagaaggcaacactactacaacaaaggagagaaggagagatgaaggaaatagaaagaccttttgagacatataaggaaaatattgaattaaaagaaaacgatgaaaagatgaaagcaatgaagagatcaagaacttgggggcagaaatgtgcaccaatgtctgacctgacagacctcaagagcttgcctgatacagaactcatgaaagacacggcacgtggccagaatctcctccaaacccaagatcatgccaaggcaccaaagagtgagaaaggcaaaatcactaaaatgccctgccagtcattacaaccagaaccaataaacaccccaacacacacaaaacaacagttgaaggcatccctggggaaagtaggtgtgaaagaagagctcctagcagtcggcaagttcacacggacgtcaggggagaccacgcacacgcacagagagccagcaggagatggcaagagcatcagaacgtttaaggagtctccaaagcagatcctggacccagcagcccgtgtaactggaatgaagaagtggccaagaacgcctaaggaagaggcccagtcactagaagacctggctggcttcaaagagctcttccagacaccaggtccctctgaggaatcaatgactgatgagaaaactaccaaaatagcctgcaaatctccaccaccagaatcagtggacactccaacaagcacaaagcaatggcctaagagaagtctcaggaaagcagatgtagaggaagaattcttagcactcaggaaactaacaccatcagcagggaaagccatgcttacgcccaaaccagcaggaggtgatgagaaagacattaaagcatttatgggaactccagtgcagaaactggacctggcaggaactttacctggcagcaaaagacagctacagactcctaaggaaaaggcccaggctctagaagacctggctggctttaaagagctcttccagactcctggtcacaccgaggaattagtggctgctggtaaaaccactaaaataccctgcgactctccacagtcagacccagtggacaccccaacaagcacaaagcaacgacccaagagaagtatcaggaaagcagatgtagagggagaactcttagcgtgcaggaatctaatgccatcagcaggcaaagccatgcacacgcctaaaccatcagtaggtgaagagaaagacatcatcatatttgtgggaactccagtgcagaaactggacctgacagagaacttaaccggcagcaagagacggccacaaactcctaaggaagaggcccaggctctggaagacctgactggctttaaagagctcttccagacccctggtcatactgaagaagcagtggctgctggcaaaactactaaaatgccctgcgaatcttctccaccagaatcagcagacaccccaacaagcacaagaaggcagcccaagacacctttggagaaaagggacgtacagaaggagctctcagccctgaagaagctcacacagacatcaggggaaaccacacacacagataaagtaccaggaggtgaggataaaagcatcaacgcgtttagggaaactgcaaaacagaaactggacccagcagcaagtgtaactggtagcaagaggcacccaaaaactaaggaaaaggcccaacccctagaagacctggctggctggaaagagctcttccagacaccagtatgcactgacaagcccacgactcacgagaaaactaccaaaatagcctgcagatcacaaccagacccagtggacacaccaacaagctccaagccacagtccaagagaagtctcaggaaagtggacgtagaagaagaattcttcgcactcaggaaacgaacaccatcagcaggcaaagccatgcacacacccaaaccagcagtaagtggtgagaaaaacatctacgcatttatgggaactccagtgcagaaactggacctgacagagaacttaactggcagcaagagacggctacaaactcctaaggaaaaggcccaggctctagaagacctggctggctttaaagagctcttccagacacgaggtcacactgaggaatcaatgactaacgataaaactgccaaagtagcctgcaaatcttcacaaccagacctagacaaaaacccagcaagctccaagcgacggctcaagacatccctggggaaagtgggcgtgaaagaagagctcctagcagttggcaagctcacacagacatcaggagagactacacacacacacacagagccaacaggagatggtaagagcatgaaagcatttatggagtctccaaagcagatcttagactcagcagcaagtctaactggcagcaagaggcagctgagaactcctaagggaaagtctgaagtccctgaagacctggccggcttcatcgagctcttccagacaccaagtcacactaaggaatcaatgactaatgaaaaaactaccaaagtatcctacagagcttcacagccagacctagtggacaccccaacaagctccaagccacagcccaagagaagtctcaggaaagcagacactgaagaagaatttttagcatttaggaaacaaacgccatcagcaggcaaagccatgcacacacccaaaccagcagtaggtgaagagaaagacatcaacacgtttttgggaactccagtgcagaaactggaccagccaggaaatttacctggcagcaatagacggctacaaactcgtaaggaaaaggcccaggctctagaagaactgactggcttcagagagcttttccagacaccatgcactgataaccccacagctgatgagaaaactaccaaaaaaatactctgcaaatctccgcaatcagacccagcggacaccccaacaaacacaaagcaacggcccaagagaagcctcaagaaagcagacgtagaggaagaatttttagcattcaggaaactaacaccatcagcaggcaaagccatgcacacgcctaaagcagcagtaggtgaagagaaagacatcaacacatttgtggggactccagtggagaaactggacctgctaggaaatttacctggcagcaagagacggccacaaactcctaaagaaaaggccaaggctctagaagatctggctggcttcaaagagctcttccagacaccaggtcacactgaggaatcaatgaccgatgacaaaatcacagaagtatcctgcaaatctccacaaccagacccagtcaaaaccccaacaagctccaagcaacgactcaagatatccttggggaaagtaggtgtgaaagaagaggtcctaccagtcggcaagctcacacagacgtcagggaagaccacacagacacacagagagacagcaggagatggaaagagcatcaaagcgtttaaggaatctgcaaagcagatgctggacccagcaaactatggaactgggatggagaggtggccaagaacacctaaggaagaggcccaatcactagaagacctggccggcttcaaagagctcttccagacaccagaccacactgaggaatcaacaactgatgacaaaactaccaaaatagcctgcaaatctccaccaccagaatcaatggacactccaacaagcacaaggaggcggcccaaaacacctttggggaaaagggatatagtggaagagctctcagccctgaagcagctcacacagaccacacacacagacaaagtaccaggagatgaggataaaggcatcaacgtgttcagggaaactgcaaaacagaaactggacccagcagcaagtgtaactggtagcaagaggcagccaagaactcctaagggaaaagcccaacccctagaagacttggctggcttgaaagagctcttccagacaccagtatgcactgacaagcccacgactcacgagaaaactaccaaaatagcctgcagatctccacaaccagacccagtgggtaccccaacaatcttcaagccacagtccaagagaagtctcaggaaagcagacgtagaggaagaatccttagcactcaggaaacgaacaccatcagtagggaaagctatggacacacccaaaccagcaggaggtgatgagaaagacatgaaagcatttatgggaactccagtgcagaaattggacctgccaggaaatttacctggcagcaaaagatggccacaaactcctaaggaaaaggcccaggctctagaagacctggctggcttcaaagagctcttccagacaccaggcactgacaagcccacgactgatgagaaaactaccaaaatagcctgcaaatctccacaaccagacccagtggacaccccagcaagcacaaagcaacggcccaagagaaacctcaggaaagcagacgtagaggaagaatttttagcactcaggaaacgaacaccatcagcaggcaaagccatggacaccccaaaaccagcagtaagtgatgagaaaaatatcaacacatttgtggaaactccagtgcagaaactggacctgctaggaaatttacctggcagcaagagacagccacagactcctaaggaaaaggctgaggctctagaggacctggttggcttcaaagaactcttccagacaccaggtcacactgaggaatcaatgactgatgacaaaatcacagaagtatcctgtaaatctccacagccagagtcattcaaaacctcaagaagctccaagcaaaggctcaagatacccctggtgaaagtggacatgaaagaagagcccctagcagtcagcaagctcacacggacatcaggggagactacgcaaacacacacagagccaacaggagatagtaagagcatcaaagcgtttaaggagtctccaaagcagatcctggacccagcagcaagtgtaactggtagcaggaggcagctgagaactcgtaaggaaaaggcccgtgctctagaagacctggttgacttcaaagagctcttctcagcaccaggtcacactgaagagtcaatgactattgacaaaaacacaaaaattccctgcaaatctcccccaccagaactaacagacactgccacgagcacaaagagatgccccaagacacgtcccaggaaagaagtaaaagaggagctctcagcagttgagaggctcacgcaaacatcagggcaaagcacacacacacacaaagaaccagcaagcggtgatgagggcatcaaagtattgaagcaacgtgcaaagaagaaaccaaacccagtagaagaggaacccagcaggagaaggccaagagcacctaaggaaaaggcccaacccctggaagacctggccggcttcacagagctctctgaaacatcaggtcacactcaggaatcactgactgctggcaaagccactaaaataccctgcgaatctcccccactagaagtggtagacaccacagcaagcacaaagaggcatctcaggacacgtgtgcagaaggtacaagtaaaagaagagccttcagcagtcaagttcacacaaacatcaggggaaaccacggatgcagacaaagaaccagcaggtgaagataaaggcatcaaagcattgaaggaatctgcaaaacagacaccggctccagcagcaagtgtaactggcagcaggagacggccaagagcacccagggaaagtgcccaagccatagaagacctagctggcttcaaagacccagcagcaggtcacactgaagaatcaatgactgatgacaaaaccactaaaataccctgcaaatcatcaccagaactagaagacaccgcaacaagctcaaagagacggcccaggacacgtgcccagaaagtagaagtgaaggaggagctgttagcagttggcaagctcacacaaacctcaggggagaccacgcacaccgacaaagagccggtaggtgagggcaaaggcacgaaagcatttaagcaacctgcaaagcggaacgtggacgcagaagatgtaattggcagcaggagacagccaagagcacctaaggaaaaggcccaacccctggaagacctggccagcttccaagagctctctcaaacaccaggccacactgaggaactggcaaatggtgctgctgatagctttacaagcgctccaaagcaaacacctgacagtggaaaacctctaaaaatatccagaagagttcttcgggcccctaaagtagaacccgtgggagacgtggtaagcaccagagaccctgtaaaatcacaaagcaaaagcaacacttccctgcccccactgcccttcaagaggggaggtggcaaagatggaagcgtcacgggaaccaagaggctgcgctgcatgccagcaccagaggaaattgtggaggagctgccagccagcaagaagcagagggttgctcccagggcaagaggcaaatcatccgaacccgtggtcatcatgaagagaagtttgaggacttctgcaaaaagaattgaacctgcggaagagctgaacagcaacgacatgaaaaccaacaaagaggaacacaaattacaagactcggtccctgaaaataagggaatatccctgcgctccagacgccaagataagactgaggcagaacagcaaataactgaggtctttgtattagcagaaagaatagaaataaacagaaatgaaaagaagcccatgaagacctccccagagatggacattcagaatccagatgatggagcccggaaacccatacctagagacaaagtcactgagaacaaaaggtgcttgaggtctgctagacagaatgagagctcccagcctaaggtggcagaggagagcggagggcagaagagtgcgaaggttctcatgcagaatcagaaagggaaaggagaagcaggaaattcagactccatgtgcctgagatcaagaaagacaaaaagccagcctgcagcaagcactttggagagcaaatctgtgcagagagtaacgcggagtgtcaagaggtgtgcagaaaatccaaagaaggctgaggacaatgtgtgtgtcaagaaaataacaaccagaagtcatagggacagtgaagatatttgacagaaaaatcgaactgggaaaaatataataaagttagttttgtgataagttctagtgcagtttttgtcataaattacaagtgaattctgtaagtaaggctgtcagtctgcttaagggaagaaaactttggatttgctgggtctgaatcggcttcataaactccactgggagcactgctgggctcctggactgagaatagttgaacaccgggggctttgtgaaggagtctgggccaaggtttgccctcagctttgcagaatgaagccttgaggtctgtcaccacccacagccaccctacagcagccttaactgtgacacttgccacactgtgtcgtcgtttgtttgcctatgttctccagggcacggtggcaggaacaactatcctcgtctgtcccaacactgagcaggcactcggtaaacacgaatgaatggataagcgcacggatgaatggagcttacaagatctgtctttccaatggccgggggcatttggtccccaaattaaggctattggacatctgcacaggacagtcctatttttgatgtcctttcctttctgaaaataaagttttgtgctttggagaatgactcgtgagcacatctttagggaccaagagtgactttctgtaaggagtgactcgtggcttgccttggtctcttgggaatacttttctaactagggttgctctcacctgagacattctccacccgcggaatctcagggtcccaggctgtgggccatcacgacctcaaactggctcctaatctccagctttcctgtcattgaaagcttcggaagtttactggctctgctcccgcctgttttctttctgactctatctggcagcccgatgccacccagtacaggaagtgacaccagtactctgtaaagcatcatcatccttggagagactgagcactcagcaccttcagccacgatttcaggatcgcttccttgtgagccgctgcctccgaaatctcctttgaagcccagacatctttctccagcttcagacttgtagatataactcgttcatcttcatttactttccactttgccccctgtcctctctgtgttccccaaatcagagaatagcccgccatcccccagatcacctgtctggattcctccccattcacccaccttgccaggtgcaggtgaggatggtgcaccagacagggtagctgtcccccaaaatgtgccctgtgcgggcagtgccctgtctccacgtttgtttccccagtgtctggcggggagccaggtgacatcataaatacttgctgaatgaatgcagaaatcagcggtactgacttgtactatattggctgccatgatagggttctcacagcgtcatccatgatcgtaagggagaatgacattctgcttgagggagggaatagaaaggggcagggaggggacatctgagggcttcacagggctgcaaagggtacagggattgcaccagggcagaacaggggagggtgttcaaggaagagtggctcttagcagaggcactttggaaggtgtgaggcataaatgcttccttctacgtaggccaacctcaaaactttcagtaggaatgttgctatgatcaagttgttctaacactttagacttagtagtaattatgaacctcacatagaaaaatttcatccagccatatgcctgtggagtggaatattctgtttagtagaaaaatcctttagagttcagctctaaccagaaatcttgctgaagtatgtcagcaccttttctcaccctggtaagtacagtatttcaagagcacgctaagggtggttttcattttacagggctgttgatgatgggttaaaaatgttcatttaagggctacccccgtgtttaatagatgaacaccacttctacacaaccctccttggtactgggggagggagagatctgacaaatactgcccattcccctaggctgactggatttgagaacaaatacccacccatttccaccatggtatggtaacttctctgagcttcagtttccaagtgaatttccatgtaataggacattcccattaaatacaagctgtttttactttttcgcctcccagggcctgtgcgatctggtcccccagcctctcttgggctttcttacactaactctgtacctaccatctcctgcctcccttaggcaggcacctccaaccaccacacactccctgctgttttccctgcctggaactttcccaccagccccaccaagatcatttcatccagtcctgagctcagcttaagggaggcttcttgcctgtgggttccctcacccccatgcctgtcctccaggctggggcaggttcttagtttgcctggaattgttctgtacctctttgtagcacgtagtgttgtgaaactaagccactaattgagtttctggctcccctcctggggttgtaagttttgttcattcatgagggccgactgtatttcctggttactgtatcccagtgaccagccacaggagatgtccaataaagtatgtgatgaaatggtcttaaaaaaaaaaaaaaaaaaaaaa

SEQ ID NO: 990 - DNA, 3391 bp, Homo sapiens
agcccccggtccctgagaagcggccccctgaaatacagcatttccgcatgagtgatgatgtccactcactgggaaaggtgacctcagatctggccaaaaggaggaagctgaactcaggaggtggcctgtcggaggagttaggttctgcccggcgttcaggagaagtgaccctgacgaaaggggaccccgggtccctggaggagtgggagacggtggtgggtgatgacttcagtctctactatgattcctactctgtggatgagcgcgtggactccgacagcaagtctgaagttgaagctctaactgaacaactaagtgaagaggaggaggaggaagaggaggaagaagaagaagaggaagaggaggaggaagaggaagaagaagaggaagatgaggagtcagggaatcagtcagataggagtggttccagtggccggcgcaaggccaagaagaaatggcgaaaagacagcccatgggtgaagccgtctcggaaacggcgcaagcgggagcctccgcgggccaaggagccacgaggagtgaatggtgtgggctcctcaggccccagtgagtacatggaggtccctctggggtccctggagctgcccagcgaggggaccctctcccccaaccacgctggggtgtccaatgacacatcttcgctggagacagagcgagggtttgaggagttgcccctgtgcagctgccgcatggaggcacccaagattgaccgcatcagcgagagggcggggcacaagtgcatggccactgagagtgtggacggagagctgtcaggctgcaatgccgccatcctcaagcgggagaccatgaggccatccagccgtgtggccctgatggtgctctgtgagacccaccgcgcccgcatggtcaaacaccactgctgcccgggctgcggctacttctgcacggcgggcaccttcctggagtgccaccctgacttccgtgtggcccaccgcttccacaaggcctgtgtgtctcagctgaatgggatggtcttctgtccccactgtggggaggatgcttctgaagctcaagaggtgaccatcccccggggtgacggggtgaccccaccggccggcactgcagctcctgcacccccacccctgtcccaggatgtccccgggagagcagacacttctcagcccagtgcccggatgcgagggcatggggaaccccggcgcccgccctgcgatcccctggctgacaccattgacagctcagggccctccctgaccctgcccaatgggggctgcctttcagccgtggggctgccactggggccaggccgggaggccctggaaaaggccctggtcatccaggagtcagagaggcggaagaagctccgtttccaccctcggcagttgtacctgtccgtgaagcagggcgagctgcagaaggtgatcctgatgctgttggacaacctggaccccaacttccagagcgaccagcagagcaagcgcacgcccctgcatgcagccgcccagaagggctccgtggagatctgccatgtgctgctgcaggctggagccaacataaatgcagtggacaaacagcagcggacgccactgatggaggccgtggtgaacaaccacctggaggtagcccgttacatggtgcagcgtggtggctgtgtctatagcaaggaggaggacggttccacctgcctccaccacgcagccaaaatcgggaacttggagatggtcagcctgctgctgagcacaggacaggtggacgtcaacgcccaggacagtggggggtggacgcccatcatctgggctgcagagcacaagcacatcgaggtgatccgcatgctactgacgcggggcgccgacgtcaccctcactgataacgaggagaacatctgcctgcactgggcctccttcacgggcagcgccgccatcgccgaagtccttctgaatgcgcgctgtgacctccatgctgtcaactaccatggggacacccccctgcacatcgcagctcgggagagctaccatgactgcgtgctgttattcctgtcacgtggggccaaccctgagctgcggaacaaagagggggacacagcatgggacctgactcccgagcgctccgacgtgtggtttgcgcttcaactcaaccgcaagctccgacttggggtgggaaatcgggccatccgcacagagaagatcatctgccgggacgtggctcggggctatgagaacgtgcccattccctgtgtcaacggtgtggatggggagccctgccctgaggattacaagtacatctcagagaactgcgagacgtccaccatgaacatcgatcgcaacatcacccacctgcagcactgcacgtgtgtggacgactgctctagctccaactgcctgtgcggccagctcagcatccggcgctggtatgacaaggatgggcgattgctccaggaatttaacaagattgagcctccgctgattttcgagtgtaaccaggcgtgctcatgctggagaaactgcaagaaccgggtcgtacagagtggcatcaaggtgcggctacagctctaccgaacagccaagatgggctggggggtccgcgccctgcagaccatcccacaggggaccttcatctgcgagtatgtcggggagctgatctctgatgctgaggctgatgtgagagaggatgattcttacctcttcgacttagacaacaaggatggagaggtgtactgcatagatgcccgttactatggcaacatcagccgcttcatcaaccacctgtgtgaccccaacatcattcccgtccgggtcttcatgctgcaccaagacctgcgatttccacgcatcgccttcttcagttcccgagacatccggactggggaggagctagggtttgactatggcgaccgcttctgggacatcaaaagcaaatatttcacctgccaatgtggctctgagaagtgcaagcactcagccgaagccattgccctggagcagagccgtctggcccgcctggacccacaccctgagctgctgcccgagctcggctccctgccccctgtcaacacatgagaacggaccacaccctctctccccagcatggatggccacagctcagccgcctcctctgccaccagctgctcgcacccatgcctgggggtgctgccatcttctctccccaccaccctttcacacattcctgaccagagatcccagccaggccctggaggtctgacagcccctccctcccagagctggttcctccctgggagggcaacttcagggctggccaccccccgtgttccccatcctcagttgaagtttgatgaattgaagtcgggcctctatgccaactggttccttttgttctcaataaatgttgggtttggtaataaaaaaaaaaaaaaaaa

SEQ ID NO: 991 - DNA, 817 bp, Homo sapiens
agtcctgcgtccgggccccgaggcgcagcagggcaccaggtggagcaccagctacgcgtggcgcagcgcagcgtccctagcaccgagcctcccgcagccgccgagatgctgcgaacagagagctgccgccccaggtcgcccgccggacaggtggccgcggcgtccccgctcctgctgctgctgctgctgctcgcctggtgcgcgggcgcctgccgaggtgctccaatattacctcaaggattacagcctgaacaacagctacagttgtggaatgagatagatgatacttgttcgtcttttctgtccattgattctcagcctcaggcatccaacgcactggaggagctttgctttatgattatgggaatgctaccaaagcctcaggaacaagatgaaaaagataatactaaaaggttcttatttcattattcgaagacacagaagttgggcaagtcaaatgttgtgtcgtcagttgtgcatccgttgctgcagctcgttcctcacctgcatgagagaagaatgaagagattcagagtggacgaagaattccaaagtccctttgcaagtcaaagtcgaggatattttttattcaggccacggaatggaagaaggtcagcagggttcatttaaaatggatgccagctaattttccacagagcaatgctatggaatacaaaatgtactgacattttgttttcttctgaaaaaaatccttgctaaatgtactctgttgaaaatccctgtgttgtcaatgttctcagttgtaacaatgttgtaaatgttcaatttgttgaaaattaaaaaatctaaaaataaa

SEQ ID NO: 992 - DNA, 3302 bp, Homo sapiens
cggtgctgccgccgttgccgggagccgcggagacaagtcattacgttttcatttctcacaactgggctgagcacaactgaaccatgggggaacacagtccagacaacaacatcatctactttgaggcagaggaagatgagctgacccccgatgataaaatgctcaggtttgtggataaaaacggactggtgccttcctcatctggaactgtttatgataggaccactgttcttattgagcaggaccctggcactttggaggatgaagatgacgacggacagtgcggagaacacttgccttttctagtagggggtgaagagggctttcacctgatagatcatgaagcaatgtcccagggttatgtgcagcacattatctcaccagatcagattcatttgacaataaaccctggttccacacccatgccaagaaatattgaaggtgcaaccctcactctgcagtcggaatgtccggaaacaaaacgtaaagaagtaaagcggtaccaatgtacctttgagggctgtccccgcacctacagcacagcaggcaacctgcgaacccaccagaagactcaccgaggagagtacacctttgtctgtaatcaggagggctgtggcaaagccttccttacctctcacagcctcaggatccacgtgcgagtgcacacgaaggagaagccatttgagtgtgacgtgcagggctgtgagaaggcattcaacacactgtacaggctgaaagcacatcagaggcttcacacagggaaaacgtttaactgtgaatctgaaggctgcagcaaatacttcaccacactcagtgatctgaggaagcacattcgaactcatacaggggaaaagccatttcggtgcgatcacgatggctgtggaaaagcatttgcagcaagccaccaccttaaaactcacgttcgtacacatactggtgaaagacccttcttctgccccagtaatggctgtgagaaaacattcagcactcaatacagtctcaaaagtcacatgaaaggtcatgataacaaaggacactcatacaatgcacttccacaacacaatggatcagaggatacaaatcactcactttgtctaagtgacttgagccttctgtccacagattctgaattgcgagaaaattccagtacgacccagggccaggacctcagcacaatttcaccagcaatcatctttgaatcaatgttccagaattcagatgatacggcaattcaggaagatcctcaacagacagcttccttgactgaaagttttaatggtgatgcagagtcagtcagtgatgttccgccatccacaggaaattcagcatctttatctcttccacttgtactgcaacctggcctctccgagccaccccagcctctactacctgcctcagctccgtctgctcctccgcctgctccctccctaggacctggctcccagcaagctgcatttggcaacccccctgctctcttacaacctccagaagtgcctgttccccacagcacacagtttgctgctaatcatcaagagtttcttccgcacccccaggcaccgcagcccattgtaccaggactttctgttgttgctggggcttctgcatcagcagcggcagtggcatcagctgtggcagcaccagccccaccacaaagtactactgagcccctgccagccatggtccagactctgcccctgggtgccaactctgtcctaactaataatcccacaataaccatcaccccaactcccaacacagctatcctgcagtccagcctagtcatgggagaacagaacttacaatggatattaaatggtgccaccagttctccacaaaaccaagaacaaattcagcaagcatctaaagttgagaaggtgttttttaccactgcagtaccagtagccagtagcccagggagctctgtccagcagattggcctcagtgttcctgtgatcatcatcaaacaagaagaggcatgtcagtgtcagtgtgcatgccgggactctgcaaaggagcgggcatccagcaggagaaagggctgctcctccccaccccctccagagccgagcccccaggctcctgatgggcccagcctgcagctcccagcgcagactttctcttcagcccctgttcccgggtcatcatcctctaccttgccctcctcctgtgagcaaagccgacaagcagagactccttcagaccctcagacagaaacattaagtgccatggatgtgtcagagtttctatccctccagagcctggacaccccgtccaatctgattcccattgaagcactactgcagggggaggaggagatgggcctcaccagcagcttctccaagtgaagggcccatgtgtgctcacctctgggaaaagcgggtgagcaggaggcatgaggtacaatgcctgccatcatgggtcagaaatttgaaggatgaagaaatctactgtttgaaatcctcacctttcagacgtattttctttattcacatcccaggagcatccattttaaggaactattctttggaaaaaaacaaaaaacaaaaaaaacaacaaaaaaagctaagttataagtgaactgtttggctgcactgtatgtcacttttgcttgttgtcatgtgaacttggaaactaaggttactcgtgtgcataaaaattctaaatgaaagggtgtggtttccatcaatctgatgctgcccatcgcttgcactggggtctttgtggatcgggcaggagttttcagtgtgttgggtgttgctccttcctatgtgtcttttgaatctgaggctgacatttgcttggaaggccagacccttgctccatcagagagggcagtggcaaaggccagtgaggcagctgtgagttggacagggttcaggtgagatggtgttgtcatttgtgcttagtgttggtggtgctcagggtggataacacgggtcgttctgcagcccgcttcagcacaaataggcagcttaaggcctggctcacaggctgtggggttgatctggctctgcagaggccctaggcagcttgttgactgctgtctgttgatgacgtgtgtgcaaagcaggctctagcaacatgatcactgtccttgccttcctggttctttctctcggttggttgccagggcttgcagatcgcagtgaattttccttggggaacatcgctgttttgtcctagagtgaacttgtggcttatggccagtgctgtttggtggtctgccttctttttaatggtattttcttcctcagagcagaagggctgcattttgcttatcagaagaaggtgcagatttaagg

SEQ ID NO: 993 - DNA, 3074 bp, Homo sapiens
gaattccggggagcaggaagagccaacatgctggccccgcgcggagccgccgtcctcctgctgcacctggtcctgcagcggtggctagcggcaggcgcccaggccaccccccaggtctttgaccttctcccatcttccagtcagaggctaaacccaggcgctctgctgccagtcctgacagaccccgccctgaatgatctctatgtgatttccaccttcaagctgcagactaaaagttcagccaccatcttcggtctttactcttcaactgacaacagtaaatattttgaatttactgtgatgggacgcttaagcaaagccatcctccgttacctgaagaacgatgggaaggtgcatttggtggttttcaacaacctgcagctggcagacggaaggcggcacaggatcctcctgaggctgagcaatttgcagcgaggggccggctccctagagctctacctggactgcatccaggtggattccgttcacaatctccccagggcctttgctggcccctcccagaaacctgagaccattgaattgaggactttccagaggaagccacaggacttcttggaagagctgaagctggtggtgagaggctcactgttccaggtggccagcctgcaagactgcttcctgcagcagagtgagccactggctgccacaggcacaggggactttaaccggcagttcttgggtcaaatgacacaattaaaccaactcctgggagaggtgaaggaccttctgagacagcaggttaaggaaacatcatttttgcgaaacaccatagctgaatgccaggcttgcggtcctctcaagtttcagtctccgaccccaagcacggtggtcgccccggctccccctgcaccgccaacacgcccacctcgtcggtgtgactccaacccatgtttccgaggtgtccaatgtaccgacagtagagatggcttccagtgtgggccctgccccgagggctacacaggaaacgggatcacctgtattgatgttgatgagtgcaaataccatccctgctacccgggcgtgcactgcataaatttgtctcctggcttcagatgtgacgcctgcccagtgggcttcacagggcccatggtgcagggtgttgggatcagttttgccaagtcaaacaagcaggtctgcactgacattgatgagtgtcgaaatggagcgtgcgttcccaactcgatctgcgttaatactttgggatcttaccgctgtgggccttgtaagccggggtatactggtgatcagataaggggatgcaaagtggaaagaaactgcagaaacccagagctgaacccttgcagtgtgaatgcccagtgcattgaagagaggcagggggatgtgacatgtgtgtgtggagtcggttgggctggagatggctatatctgtggaaaggatgtggacatcgacagttaccccgacgaagaactgccatgctctgccaggaactgtaaaaaggacaactgcaaatatgtgccaaattctggccaagaagatgcagacagagatggcattggcgacgcttgtgacgaggatgctgacggagatgggatcctgaatgagcaggataactgtgtcctgattcataatgtggaccaaaggaacagcgataaagatatctttggggatgcctgtgataactgcctgagtgtcttaaataacgaccagaaagacaccgatggggatggaagaggagatgcctgtgatgatgacatggatggagatggaataaaaaacattctggacaactgcccaaaatttcccaatcgtgaccaacgggacaaggatggtgatggtgtgggggatgcctgtgacagttgtcctgatgtcagcaaccctaaccagtctgatgtggataatgatctggttggggactcctgtgacaccaatcaggacagtgatggagatgggcaccaggacagcacagacaactgccccaccgtcattaacagtgcccagctggacaccgataaggatggaattggtgacgagtgtgatgatgatgatgacaatgatggtatcccagacctggtgccccctggaccagacaactgccggctggtccccaacccagcccaggaggatagcaacagcgacggagtgggagacatctgtgagtctgactttgaccaggaccaggtcatcgatcggatcgacgtctgcccagagaacgcagaggtcaccctgaccgacttcagggcttaccagaccgtgggcctggatcctgaaggggatgcccagatcgatcccaactgggtggtcctgaaccagggcatggagattgtacagaccatgaacagtgatcctggcctggcagtggggtacacagcttttaatggagttgacttcgaagggaccttccatgtgaatacccagacagatgatgactatgcaggctttatctttggctaccaagatagctccagcttctacgtggtcatgtggaagcagacggagcagacatattggcaagccaccccattccgagcagttgcagaacctggcattcagctcaaggctgtgaagtctaagacaggtccaggggagcatctccggaactccctgtggcacacgggggacaccagtgaccaggtcaggctgctgtggaaggactccaggaatgtgggctggaaggacaaggtgtcctaccgctggttcctacagcacaggccccaggtgggctacatcagggtacgattttatgaaggctctgagttggtggctgactctggcgtcaccatagacaccacaatgcgtggaggccgacttggcgttttctgcttctctcaagaaaacatcatctggtccaacctcaagtatcgctgcaatgacaccatccctgaggacttccaagagtttcaaacccagaatttcgaccgcttcgataattaaaccaaggaagcaatctgtaactgcttttcggaacactaaaaccatatatattttaacttcaattttctttagcttttaccaacccaaatatatcaaaacgttttatgtgaatgtggcaataaaggagaagagatcatttttaaaaaaaaaaaaaaaaaaaa

SEQ ID NO: 994 - DNA, 4238 bp, Homo sapiens
gcgctctcaggcgggctccggcggcagcgacgcgagcgcggcgatggggagcggcggcgtggtccactgtaggtgtgccaagtgtttctgttatcctacaaagcgaagaataaggaggaggccccgaaacctgaccatcttgagtctccccgaagatgtgctctttcacatcctgaaatggctttctgtagaggacatcctggccgtccgagctgtacactcccagctgaaggacctggtggacaaccacgccagtgtgtgggcatgtgccagcttccaggagctgtggccgtctccagggaacctgaagctctttgaaagggctgctgaaaaggggaatttcgaagctgctgtgaagctgggcatagcctacctctacaatgaaggcctgtctgtgtctgatgaggcccgcgcagaagtgaatggcctgaaggcctctcgcttcttcagtctcgctgagcggctgaatgtgggtgccgcacctttcatctggctcttcatccgccctccgtggtcggtgagcggaagctgctgcaaggccgtggttcacgagagcctcagggcagagtgccagctgcagaggactcacaaagcatccatattgcactgcttgggcagagtgctgagtctgttcgaggatgaggagaagcagcagcaggcccatgacctgtttgaggaggctgctcatcagggatgtctgaccagctcctacctcctctgggaaagcgacaggaggacagatgtgtcagatcctgggcgatgcctccacagcttccgaaaactcagggactacgctcgcaaaggctgctgggaagcgcagctgtctttagccaaagcctgtgcaaatgcaaaccagcttggactggaggtgagagcttccagtgagatcgtctgccagctatttcaggcttcccaggctgtcagtaaacaacaagtcttctccgtgcagaagggactcaatgacacaatgaggtacattctgatcgactggctggtggaagttgccaccatgaatgacttcacaagcctgtgcctgcacctgaccgtggagtgtgtggaccggtacctgcggaggaggctggtgccgcggtacaggctccagctgctgggcatcgcctgcatggtcatctgcacccggtttatcagtaaagagatcctgaccatccgggaggccgtatggctcacggacaacacttacaagtacgaggacctggtgagaatgatgggcgagatcgtctccgccttggaagggaagattcgagtccccactgtggtggattacaaggaggtcctgctgacgctagtccctgtggagctgagaacccagcacctgtgcagcttcctctgcgagctctccctgctgcacaccagcctgtccgcctacgccccagcccgcctggctgccgcagccctgctcctggccagactgacgcacgggcagacacagccctggaccactcagctgtgggacctcaccggattctcctatgaagacctcattccctgcgtcttgagcctccataagaagtgcttccatgatgacgcccccaaggactacaggcaagtctctctgaccgccgtgaagcagcggtttgaggacaagcgctatggagaaatcagccaggaagaggtgctgagctacagccagttgtgtgctgcattaggagtgacacaagacagccccgaccccccgactttcctcagcacaggggagatccacgccttcctcagctctccctcggggcggagaaccaaacggaagcgggagaacagcctccaggaagacagaggcagcttcgttaccacccccactgcggagctgtccagccaggaggagaccgtgctgggcagcttcctcgactggagcctggactgctgctctggctatgaaggcgaccaggagagtgagggcgagaaggagggcgacgtgacagctcccagcggcatcctcgatgtcaccgtggtctacctgaacccagaacagcattgctgccaggaatccagtgatgaggaggcttgtccagaggcaaagggaccccaggacccacaggcactggcgctggacacccagatccctgcaacccctggacccaaacccctggtccgcaccagccgggagccagggaaggacgtcacgacctcagggtactcctccgtcagcaccgcaagtcccacaagctccgtggacggtggcttgggggccctgccccaacctacctcagtgctgtccctgcacagtgactcgcacacacagccctgccaccatcaggccaggaagtcatgtttacagtgtcgtcccccaagtcccccggagagcagtgttccccagcaacaggtgaagcggataaacctatgcatacacagtgaggaggaggacatgaacctgggccttgtgaggctgtaagtgtgtcagcacatttgccgcagtggatgtgtactgagggggctggaggcgaagggtgggagcatagcataggaacgctgcatagaccatggaggcctttgcgcagagagcagagaggatgacttgcggccaccaagtttctgtctccgcgggagtcccgtgcaagccatcagaatgttgaaatgagggtgaagagctcagatccctctctttggaaagtttagcctggaagcagttggccacactgtgtggagggcacctctctgtcccttccgtgtctcactgtctctggaagcttcagcccatgtgtgtcctggtgttcccagccccaccagagccccgtgccgggagctgacagctttcacgcttaaggcacgtgtgacctgggtagtcagacaccacttgagcccctgcccacatctgctggtttggggcttcagtggggagctgacagctgtgagcacaccactgtcccctcatccacctcggcctgcatggggcacccacttccttctgggtggggcttccatggtaagggggcctgcgtccctgcacactgcgaggactgccttgccacaggcccactccctacgacacgtgactcgttttagagctctgtcccagaggcgttcgtatgtgacccacagatggcgtcaatgtgaacacctctctttgtgctgaatttctgggccattcttttcctgtcttatttctaaatttccttcttccaagatgaaaacaaaagaaaaacttaaaacagaaggtattaaaaaaacaagagattcccaccattatttaggttcacctgcaaaacaaaaatcttactccagcccctcaatgccatcctgacacactttatgcaaaaagaattttcccagataggctagccagaaaaaacttcaagtcctctgtaacatctgaggtgaccaagaggcagaagagcagagcagtcgggggccgtgtcctggctgatcccaactgcagctctgctgtgggggcccgtgggagggaggcagacccctgggctttcctgctggccacggagactctgctcctgcatggaaagggagcctgggagccagcagcccacgcctggggagcctgcctggggccatgtgaccatggcctctccctgggaacgggctgaccacaacacaccctgctgccatccacttctgtttactctgcaaatgtaagaaagaaccacttggccagaagtgtcccccagatgcttttttttttttttttttggagacagttttgctcttgtctccccggctggagtgcagtggcatgatctcaactctcaactcactgtaacctccgcctcccggatactcctgcctcagcctcctgggtagctgggattacaagcacccaaccacgcccagctaatttttgtattttcggtagagacgggatttcaccatgttggccaggctagtctcgaactcatgacctcaagtgatccgcccacttcggtctcccaaagtgctgggattacaggcatgagccacggcgcctggcccccaaatgctcttgaaccggaaacccagggatgggagatgctcactgagctgctgcttttatgtgtgctggtgctatgtgtgttcatgtccgcggcagctgtctttttgctactataagggaattctggccaccctgggtggggtgtggtcggggtgagaacccaagcgttggaactgtagacccgtcctgtcgactgtgtgcccctgggcatgtgtgagcctcagtttcctcatctgtaaggggggcaatgatacctacctcacagggggttgtgaggattaaatgtgaggaggatagtggcaac

SEQ ID NO: 995 - DNA, 5292 bp, Homo sapiens
ctcacaatgcaggcgctccagctctgacacgtgcacttctttattggaaaagaataaagcagtcactgatgtggcaggggcaggacacgagcagctgccgtcctcctcccagcgtgcctggcatggtcgcaggggagcgggtgcctggagtcccggtgacaccacggggcacactgagggagctgaggagccggggccgcgcagcctcctggatgctcagcggatcgtgtacttgtcccacttcttttcagggtcgtagggttcccagcggctggcgggaaagatgtgcttgttcttctcgtaccagctcctcagcaccaccttgcctgcatgggactcatccttctccacagtggcgtcactgagcaaccgcacatcgtcatgaacatcaaagttgaagagtggtccactcttcccccgtgccttggtgacgatgaagtcgtagaagctgtgatggtgagggatgatcaagtcctccttgatgtacatgagctgctccacccctgcggacctcagctcactgaagtctttccgaaggatctcgagcgccttctgcaggaactgctgcatggtgttgccctttctcatcttgactgtccgccggtgcccagagccatcccagtagctgaaggtgatctcgatctcctcactcttgatcttctcctgcttggcttcccactcctgccgcagctcttcccgaagccgattctcctcctcctcacggtctcgatcaggcaagaagcttgtgtcaacgtctgggttcttccccagttttctcttcttcgtggtgatctcttccctttccatctcctcctcatacatggccgcctcctcttcctcctcgcctccctcttcttcctcctccagggtgaaggacaggctggagatcttccgcttggcttccttcttacgctccttctctcgaagcttctccagcttcatctgcagctccttggactgctccttcttggccagctgcttctcccgctccttcaccagagcctcctgcttggccttcatgtcattcagggtcacgagacccacggtgctggacttgagctctgcctcccgggctgccgctggcaacatcgtgtcacccagctaagaaaatccgcgggcccgagccacgcgcctgtgaatcggagaggtcccactgcccgagtggagccgggctgagattcttctcaagttgagcctcagtgatcctgtggccgaagttagcgccttgacgtgggacaaccggacacgtcgccaggagagaactgaggcgccttctagcagttgtgacgccaaaatcacgtctccggagacccgcgccctccgccagccgggcgcaccctcgccggtagccttctttgtgcgccgtccggactcccagctcccggcccggcagccgagccccagcacaaagcagtcggaccgcgccgcccgcctcccctctcgcgtctccgcctcggtttcccaactctgcgccgtcgggccgcggcaggatgattgcctcgcatctgcttgcctacttcttcacggagctcaaccatgaccaagtgcagaaggttgaccagtatctctaccacatgcgcctctctgatgagaccctcttggagatctctaagcggttccgcaaggagatggagaaagggcttggagccaccactcaccctactgcagcagtgaagatgctgcccacctttgtgaggtccactccagatgggacagaacacggagagttcctggctctggatcttggagggaccaacttccgtgtgctttgggtgaaagtaacggacaatgggctccagaaggtggagatggagaatcagatctatgccatccctgaggacatcatgcgaggcagtggcacccagctgtttgaccacattgccgaatgcctggctaacttcatggataagctacaaatcaaagacaagaagctcccactgggttttaccttctcgttcccctgccaccagactaaactagacgagagtttcctggtctcatggaccaagggattcaagtccagtggagtggaaggcagagacgttgtggctctgatccggaaggccatccagaggagaggggactttgatatcgacattgtggctgtggtgaatgacacagttgggaccatgatgacctgtggttatgatgaccacaactgtgagattggtctcattgtgggcacgggcagcaacgcctgctacatggaagagatgcgccacatcgacatggtggaaggcgatgaggggcggatgtgtatcaatatggagtggggggccttcggggacgatggctcgctcaacgacattcgcactgagtttgaccaggagattgacatgggctcactgaacccgggaaagcaactgtttgagaagatgatcagtgggatgtacatgggggagctggtgaggcttatcctggtgaagatggccaaggaggagctgctctttggggggaagctcagcccagagcttctcaacaccggtcgctttgagaccaaagacatctcagacattgaaggggagaaggatggcatccggaaggcccgtgaggtcctgatgcggttgggcctggacccgactcaggaggactgcgtggccactcaccggatctgccagatcgtgtccacacgctccgccagcctgtgcgcagccaccctggccgccgtgctgcagcgcatcaaggagaacaaaggcgaggagcggctgcgctctactattggggtcgacggttccgtctacaagaaacacccccattttgccaagcgtctacataagaccgtgcggcggctggtgcccggctgcgatgtccgcttcctccgctccgaggatggcagtggcaaaggtgcagccatggtgacagcagtggcttaccggctggccgatcaacaccgtgcccgccagaagacattagagcatctgcagctgagccatgaccagctgctggaggtcaagaggaggatgaaggtagaaatggagcgaggtctgagcaaggagactcatgccagtgcccccgtcaagatgctgcccacctacgtgtgtgctaccccggacggcacagagaaaggggacttcttggccttggaccttggaggaacaaatttccgggtcctgctggtccgtgttcggaatgggaagtggggtggagtggagatgcacaacaagatctacgccatcccgcaggaggtcatgcacggcaccggggacgagctctttgaccacattgtccagtgcatcgcggacttcctcgagtacatgggcatgaagggcgtgtccctgcctctgggttttaccttctccttcccctgccagcagaacagcctggacgagagcatcctcctcaagtggacaaaaggcttcaaggcatctggctgcgagggcgaggacgtggtgaccctgctgaaggaagcgatccaccggcgagaggagtttgacctggatgtggttgctgtggtgaacgacacagtcggaactatgatgacctgtggctttgaagaccctcactgtgaagttggcctcattgttggcacgggcagcaatgcctgctacatggaggagatgcgcaacgtggaactggtggaaggagaagaggggcggatgtgtgtgaacatggaatggggggccttcggggacaatggatgcctagatgacttccgcacagaatttgatgtggctgtggatgagctttcactcaaccccggcaagcagaggttcgagaaaatgatcagtggaatgtacctgggtgagattgtccgtaacattctcatcgatttcaccaagcgtggactactcttccgaggccgcatctcagagcggctcaagacaaggggcatctttgaaaccaagttcttgtctcagattgagagtgactgcctggccctgctgcaagtccgagccaccctgcaacacttagggcttgagagcacctgtgacgacagcatcattgttaaggaggtgtgcactgtggtggcccggcgggcagcccagctctgtggcgcaggcatggccgctgtggtggacaggatacgagaaaaccgtgggctggacgctctcaaagtgacagtgggtgtggatgggaccctctacaagctacatcctcactttgccaaagtcatgcatgagacagtgaaggacctggctccgaaatgtgatgtgtctttcctgcagtcagaggatggcagcgggaagggggcggcgctcatcactgctgtggcctgccgcatccgtgaggctggacagcgatagaacccctgaaatcggaagggacttcctctttctctccttcttccctgttttaaattataagatgtcatccccttgtgtcagagacagaccccttggcttttgcttggcagagaggaccccactggactgggttttgtctctgcatctcattgtagagcttggtggctgagcttggccctattaagataaatagagttccaaataaggatttgttcacatgcatcataaccattcccattggttctcctaaaacatgaaaattatctcccttagtaatcccccttgccaaattccatgtccctgtataattctacaggatggggacactaatgaagatacggttgcttcaccttggagcctgaacatgacatttctaagtggggtgcatcccccagcactgatgttgttactgattctcctgtcagagatctgggaggtctccactgaggatgtgagcctgattatcctataggcagacgtggggagggtggaggggtgacagtggaggaaaatccatggatatccacgcagcagcccctctttaacctcatctacaagcatttgccctgtggattccagcatttgccattcctggaatcaaggaatcctgagtctgggcaatgaaaccaaagccaggagttgacgcatcctgcagttgggccagctgtcgcatctcagcggggcgcacatgttatccacaagcaatggacctttggggaagggggagtttttagtttgttttacaaatttttcctgcaaaagtggaatcactgtattttcattttaatttatatttgaaattttatttagttcttgagtagatctgcttcttcatcttgacatgtaatgaatggtcagttgtacgtaatgtatttatatgttaatttgttatgtatatagatgtgcaagtcttgtcagaattggcctcagtgtagttaaagggcagaaggggaagatactgactagtcatagaaatacctcattcgcctgtgggaagagaagggaagcctcttcagggtgagtgaatggcaaagcggttgcttctccg

SEQ ID NO: 996 - DNA, 4858 bp, Homo sapiens
agactccggcccctgtcggccgccaagcccctccgcccctcacagcgcccaggtccgcggccgggccttgattttttggcggggaccgtcatggcgtcgcagccaaattcgtctgcgaagaagaaagaggagaaggggaagaacatccaggtggtggtgagatgcagaccatttaatttggcagagcggaaagctagcgcccattcaatagtagaatgtgatcctgtacgaaaagaagttagtgtacgaactggaggattggctgacaagagctcaaggaaaacatacacttttgatatggtgtttggagcatctactaaacagattgatgtttaccgaagtgttgtttgtccaattctggatgaagttattatgggctataattgcactatctttgcgtatggccaaactggcactggaaaaacttttacaatggaaggtgaaaggtcacctaatgaagagtatacctgggaagaggatcccttggctggtataattccacgtacccttcatcaaatttttgagaaacttactgataatggtactgaattttcagtcaaagtgtctctgttggagatctataatgaagagctttttgatcttcttaatccatcatctgatgtttctgagagactacagatgtttgatgatccccgtaacaagagaggagtgataattaaaggtttagaagaaattacagtacacaacaaggatgaagtctatcaaattttagaaaagggggcagcaaaaaggacaactgcagctactctgatgaatgcatactctagtcgttcccactcagttttctctgttacaatacatatgaaagaaactacgattgatggagaagagcttgttaaaatcggaaagttgaacttggttgatcttgcaggaagtgaaaacattggccgttctggagctgttgataagagagctcgggaagctggaaatataaatcaatccctgttgactttgggaagggtcattactgcccttgtagaaagaacacctcatgttccttatcgagaatctaaactaactagaatcctccaggattctcttggagggcgtacaagaacatctataattgcaacaatttctcctgcatctctcaatcttgaggaaactctgagtacattggaatatgctcatagagcaaagaacatattgaataagcctgaagtgaatcagaaactcaccaaaaaagctcttattaaggagtatacggaggagatagaacgtttaaaacgagatcttgctgcagcccgtgagaaaaatggagtgtatatttctgaagaaaattttagagtcatgagtggaaaattaactgttcaagaagagcagattgtagaattgattgaaaaaattggtgctgttgaggaggagctgaatagggttacagagttgtttatggataataaaaatgaacttgaccagtgtaaatctgacctgcaaaataaaacacaagaacttgaaaccactcaaaaacatttgcaagaaactaaattacaacttgttaaagaagaatatatcacatcagctttggaaagtactgaggagaaacttcatgatgctgccagcaagctgcttaacacagttgaagaaactacaaaagatgtatctggtctccattccaaactggatcgtaagaaggcagttgaccaacacaatgcagaagctcaggatatttttggcaaaaacctgaatagtctgtttaataatatggaagaattaattaaggatggcagctcaaagcaaaaggccatgctagaagtacataagaccttatttggtaatctgctgtcttccagtgtctctgcattagataccattactacagtagcacttggatctctcacatctattccagaaaatgtgtctactcatgtttctcagatttttaatatgatactaaaagaacaatcattagcagcagaaagtaaaactgtactacaggaattgattaatgtactcaagactgatcttctaagttcactggaaatgattttatccccaactgtggtgtctatactgaaaatcaatagtcaactaaagcatattttcaagacttcattgacagtggccgataagatagaagatcaaaaaaaggaactagatggctttctcagtatactgtgtaacaatctacatgaactacaagaaaataccatttgttccttggttgagtcacaaaagcaatgtggaaacctaactgaagacctgaagacaataaagcagacccattcccaggaactttgcaagttaatgaatctttggacagagagattctgtgctttggaggaaaagtgtgaaaatatacagaaaccacttagtagtgtccaggaaaatatacagcagaaatctaaggatatagtcaacaaaatgacttttcacagtcaaaaattttgtgctgattctgatggcttctcacaggaactcagaaattttaaccaagaaggtacaaaattggttgaagaatctgtgaaacactctgataaactcaatggcaacctggaaaaaatatctcaagagactgaacagagatgtgaatctctgaacacaagaacagtttatttttctgaacagtgggtatcttccttaaatgaaagggaacaggaacttcacaacttattggaggttgtaagccaatgttgtgaggcttcaagttcagacatcactgagaaatcagatggacgtaaggcagctcatgagaaacagcataacatttttcttgatcagatgactattgatgaagataaattgatagcacaaaatctagaacttaatgaaaccataaaaattggtttgactaagcttaattgctttctggaacaggatctgaaactggatatcccaacaggtacgacaccacagaggaaaagttatttatacccatcaacactggtaagaactgaaccacgtgaacatctccttgatcagctgaaaaggaaacagcctgagctgttaatgatgctaaactgttcagaaaacaacaaagaagagacaattccggatgtggatgtagaagaggcagttctggggcagtatactgaagaacctctaagtcaagagccatctgtagatgctggtgtggattgttcatcaattggcggggttccatttttccagcataaaaaatcacatggaaaagacaaagaaaacagaggcattaacacactggagaggtctaaagtggaagaaactacagagcacttggttacaaagagcagattacctctgcgagcccagatcaacctttaattcacttgggggttggcaattttatttttaaagaaaacttaaaaataaaacctgaaaccccagaacttgagccttgtgtatagattttaaaagaatatatatatcagccgggcgcggtggctcatgcctgtaatcccagcactttgggaggctgaggcgggtggattgcttgagcccaggagtttgagaccagcctggccaacgtggcaaaacctcgtctctgttaaaaattagccgggcgtggtggcacactcctgtaatcccagctactggggaggctgaggcacgagaatcacttgaacccaggaagcggggttgcagtgagccaaaggtacaccactacactccagcctgggcaacagagcaagactcggtctcaaaaacaaaatttaaaaaagatataaggcagtactgtaaattcagttgaattttgatatctacccatttttctgtcatccctatagttcactttgtattaaattgggtttcatttgggatttgcaatgtaaatacgtatttctagttttcatataaagtagttcttttataacaaatgaaaagtatttttcttgtatattattaagtaatgaatatataagaactgtactcttctcagcttgagcttaacataggtaaatatcaccaacatctgtccttagaaaggaccatctcatgttttttttcttgctatgacttgtgtattttcttgcatcctccctagacttccctatttcgctttctcctcggctcactttctccctttttatttttcaccaaaccatttgtagagctacaaaacctatcctttcttattttcagtagtcagaattttatctagaaatcttttaacacctttttagtggttatttctaaaatcactgtcaacaataaatctaaccctagttgtatccctcctttaagtatttaaaacttgttgccccaaatgtgaaagcatttaattcctttaagaggcctaactcattcaccctgacagagttcacaaaaagcccactttagagtatacattgctattatgggagaccacccagacatctgactaatggctctgtgccacactccaagacctgtgccttttagagaagctcacaatgatttaaggactgtttgaaacttccaattatgtctataatttatattcttttgtttacatgatgaaactttttgttgttgcttgtttgtatataatacaatgtgtacatgtatctttttctcgattcaaatcttaacccttaggactctggtatttttgatctggcaaccatatttctggaagttgagatgtttcagcttgaagaaccaaaacagaaggaatatgtacaaagaataaattttctgctcacgatgagtttagtgtgtaaagtttagagacatctgactttgatagctaaattaaaccaaaccctattgaagaattgaatatatgctacttcaagaaactaaattgatctcgtagaattatcttaataaaataatggctataatttctctgcaaaatcagatgtcagcataagcgatggataatacctaataaactgccctcagtaaatccatggttaataaatgtggtttctacatt

SEQ ID NO: 997 - DNA, 4845 bp, Homo sapiens
ggtgaacctggacgagaggtgagcagtgagaccccctggggtggccctgattggggagaggggccctgtgagtctctgtgctgggtcagcaaggacaagccccagtcagggcctcggagaagggggcggcagcgctggccgacaggcgaaagcctaggtacaatgggaaggttgtcggggagagagacgggcatagagaccaagggctgcttctggaaggaggagggaaacttggtgaggaaactttggcttcaaagtgtgagtgagttgggcagaagaggagaggcctgggcttctgagaggggctgggggagcagagggggaggtggacagaggacagctctaggtgcgttcttgtttcactttgtccagggaagccccggtgctgatggcccccctggcagagatggcgctgctggagtcaaggtgagtgtctggtgtctgtgtgtgcagtgggttggggaggacattgcctcgggcctgacaggtcagctgggggtggcaggttggaacaagtctcatctcagcctagaaggaccttctgttcctgtctcttctggaacattcttctctgagcctgagacctctctcctgacagggtaatcgtggtgaaaccggtgctgtgggagctcctggaacccctgggccccctggctcccctggccccgctggtccaactggcaagcaaggagacagaggagaagctgtaagtatcctggaattcagtaaaagccgccttcccctgcgcggtggggctgaggcagtccctgggtttccgcagtctctggactaaggagcagtggcctcagatgcagaggaggcccccacctgtcctggcttttctctgacgctgcgctcactctctcctcagggtgcacaaggccccatgggaccctcaggaccagctggagcccggggaatccaggtgagtatccaagtgtcctgcactgagtccccaccagggataggctgggagggcagccagcctccaggtggttcctggcctccagccctgtgtttccggggattcctcagcttgggtgggacaggagggggctcctgtcctggccctgacctgactcaatcggtgtctgtcttgttcccagggtcctcaaggccccagaggtgacaaaggagaggctggagagcctggcgagagaggcctgaagggacaccgtggcttcactggtctgcagggtctgcccggccctcctgtgagtgtcactgcctgcgtgggacttcccgaggcctcctgccacacagagcccacttgagctccctgtgctgccaggacagcttgggatcaccctaagcagtttctaggatttcctcagggctggagggaggaggaagtggaaagggaatggggctgggacataaagctgttcccccagctcccagaatatagatagatatgtctgtgctgaccgtggccttttgcctcttccttctacacagggtccttctggagaccaaggtgcttctggtcctgctggtccttctggccctagagtaagtgacatggagttggaagatggagggggcccttcagagagtgtgggcctgtgttcccatggggagggaaatgctgctgcttctggggaagctgtgggctcaggggtcctcactcagtaatgggggcaggactggctcatgtgcctatggccagaaaagcgcctgaggccacaatggctgtaagacaaacatgaatcagcctctcgctgtcagacagaacagcattttacaaagaggagcttaggagggtaggcaagccatggagctatcctgctggttcttggccaaatagagaccaacttagggttccatgactgagcatgtgaagaactgggggcggagtggctggtgctatcaggacagccacctacccagccccagcgactccccagccttccctgtggtgaccactctttcctcacgacctctctctcttgcagggtcctcctggccccgtcggtccctctggcaaagatggtgctaatggaatccctggccccattgggcctcctggtccccgtggacgatcaggcgaaaccggccctgctgtaagtgtcctgactccttccctgctgtcgaggtgtccctaccatccgggaggcttgagctcttttttgctcagggcctcttttagggcatcagcctgcagctaacagtgatggcatcctttatcctgaggtctcctcagaggtcacagggcccatgatcagtgctgggaaactgaagagaagggctaaggaagaaatagacatggtgctgtggtttccttggtcctcgcctgctacacctccgccccacccatggggctgggaagagggacactctagtacattctagcaaatggggatggacatggaggggcactttcacacaatcctggctgatctctctgtttcctgctgcagggtcctcctggaaatcctggaccccctggtcctccaggtccccctggccctggcatcgacatgtccgcctttgctggcttaggcccgagagagaagggccccgaccccctgcagtacatgcgggccgaccaggcagccggtggcctgagacagcatgacgccgaggtggatgccacactcaagtccctcaacaaccagattgagagcatccgcagccccgagggctcccgcaagaaccctgctcgcacctgcagagacctgaaactctgccaccctgagtggaagagtggtaagcttggagaacaggatcccctgccccgggaagcagggagtcatcccttaggcctagcagcaagggaggagatgccccctagtacagggcagagctgggcctggaagtttccgccagagggttcctctcttatttcacagcagagaagctgcagccctggcccctgtcctgccatggctacctggccgaggtgacctcagggtggactccatccaccagctgggcactgcttctgctctctttgcatgtgttcttccttagggctggacttagctcatgcagatctccctgcccctgcatcctcccaggtccccctcctttcaggccacatgtgaacctcatcccttgtccctgtaggcctctctgtctctttcagtcaggcctgggtctctcaagcttttgtgtctgtgcctgtctgagcccccatgggtgctgcctcttccccctgcaggagactactggattgaccccaaccaaggctgcaccttggacgccatgaaggttttctgcaacatggagactggcgagacttgcgtctaccccaatccagcaaacgttcccaagaagaactggtggagcagcaagagcaaggagaagaaacacatctggtttggagaaaccatcaatggtggcttccatgtgagtacctgggtgccctagatgatgagcagagatggctcctcaaactctttcttttctttctccctggaagcttttagcaccttccccatattttcctccagttttctgttgggcttgagaggagggaaagaggaggaaaagtattttttccccacgtggaggtgggaaaagaggtcctctgagcttgctccactcctggaagcaaaaatgtccaactagctccctgctgccccagtacccttgaggtccttgaaccatgaactcttggcagcccctacagcccctggtcccattgaatgccagctcccaggcctcacactgccgctctctgccccaacagttcagctatggagatgacaatctggctcccaacactgccaacgtccagatgaccttcctacgcctgctgtccacggaaggctcccagaacatcacctaccactgcaagaacagcattgcctatctggacgaagcagctggcaacctcaagaaggccctgctcatccagggctccaatgacgtggagatccgggcagagggcaatagcaggttcacgtacactgccctgaaggatggctgcacggtgagtggggctgccagagagaagagctgcctgtgcccaaactgcctggagcagggctgagggttggcccgcggcagctgtcaggtcctaaagtgacaggatcatcagaggcatgagtttgagggtcatgtagagaagataggctgagtgacaggtgagagagaggcacatatcattccatcttctccattcccctggctcaggggaacaaaaccctacctggaacccagtgactactgtagaagtgttctcgcaatgtgtacagggtgaagaagcggtcacaggttgggagctcactgtggggagtggggaaggaggggaagggcagggtggagaagggccctgccgctaaggataggagttgaagtggagaggcctttggcaagccaagaagaggtctcaggagccccctcagtgtggttcaaccttgtgggctctgatgctcgccagtttgttcagttttgggcttctgggcagctggaactgggtagcaaggcatctactgaacagagcctcctccttttttctcccctagaaacataccggtaagtggggcaagactgttatcgagtaccggtcacagaagacctcacgcctccccatcattgacattgcacccatggacataggagggcccgagcaggaattcggtgtggacatagggccggtctgcttcttgtaaaaacctgaacccagaaacaacacaatccgttgcaaacccaaaggacccaagtactttccaatctcagtcactctaggactctgcactgaatggctgacctgacctgatgtccattcatcccaccctctcacagttcggacttttctcccctctctttctaagagacctgaactgggcagactgcaaaataaaatctcggtgttctatttatttattgtcttcctgt

SEQ ID NO: 998 - DNA, 995 bp, Homo sapiens
taaaatgtgaggcgattattttaagtaattatcttaccaagcccaagactggttttaaagttacctgaagctcttaacttcctcccctctgaatttagtttggggaaggtgtttttagtacaagacatcaaagtgaagtaaagcccaagtgttctttagctttttataatactgtctaaatagtgaccatctcatgggcattgttttcttctctgctttgtctgtgttttgagtctgctttcttttgtctttaaaacctgatttttaagttcttctgaactgtagaaatagctatctgatcacttcagcgtaaagcagtgtgtttattaaccatccactaagctaaaactagagcagtttgatttaaaagtgtcactcttcctccttttctactttcagtagatatgagatagagcataattatctgttttatcttagttttatacataatttaccatcagatagaactttatggttctagtacagatactctactacactcagcctcttatgtgccaagtttttctttaagcaatgagaaattgctcatgttcttcatcttctcaaatcatcagaggccaaagaaaaacactttggctgtgtctataacttgacacagtcaatagaatgaagaaaattagagtagttatgtgattatttcagctcttgacctgtcccctctggctgcctctgagtctgaatctcccaaagagagaaaccaatttctaagaggactggattgcagaagactcggggacaacatttgatccaagatcttaaatgttatattgataaccatgctcagcaatgagctattagattcattttgggaaatctccataatttcaatttgtaaactttgttaagacctgtctacattgttatatgtgtgtgacttgagtaatgttatcaacgtttttgtaaatatttactatgtttttctattagctaaattccaacaattttgtactttaataaaatgttctaaacattgc

SEQ ID NO: 999 - DNA, 2942 bp, Homo sapiens
  misc_feature (1)...(2942): n=a,t,g or c
cgagcctggcggtagaatcttcccagtaggcggcgcgggagggaaaagaggattgaggggctaggccgggcggatcccgtcctcccccgatgtgagcagttttccgaaaccccgtcaggcgaaggctgcccagagaggtggagtcggtagcggggccgggaacatgaggcagtctctcctattcctgaccagcgtggttcctttcgtgctggcgccgcgacctccggatgacccgggcttcggcccccaccagagactcgagaagcttgattctttgctctcagactacgatattctctctttatctaatatccagcagcattcggtaagaaaaagagatctacagacttcaacacatgtagaaacactactaactttttcagctttgaaaaggcattttaaattatacctgacatcaagtactgaacgtttttcacaaaatttcaaggtcgtggtggtggatggtaaaaacgaaagcgagtacactgtaaaatggcaggacttcttcactggacacgtggttggtgagcctgactctagggttctagcccacataagagatgatgatgttataatcagaatcaacacagatggggccgaatataacatagagccactttggagatttgttaatgataccaaagacaaaagaatgttagtttataaatctgaagatatcaagaatgtttcacgtttgcagtctccaaaagtgtgtggttatttaaaagtggataatgaagagttgctcccaaaagggttagtagacagagaaccacctgaagagcttgttcatcgagtgaaaagaagagctgacccagatcccatgaagaacacgtgtaaattattggtggtagcagatcatcgcttctacagatacatgggcagaggggaagagagtacaactacaaattacttaatagagctaattgacagagttgatgacatctatcggaacacttcatgggataatgcaggttttaaaggctatggaatacagatagagcagattcgcattctcaagtctccacaagaggtaaaacctggtgaaaagcactacaacatggcaaaaagttacccaaatgaagaaaaggatgcttgggatgtgaagatgttgctagagcaatttagctttgatatagctgaggaagcatctaaagtttgcttggcacaccttttcacataccaagattttgatatgggaactcttggattagcttatgttggctctcccagagcaaacagccatggaggtgtttgtccaaaggcttattatagcccagttgggaagaaaaatatctatttgaatagtggtttgacgagcacaaagaattatggtaaaaccatccttacaaaggaagctgacctggttacaactcatgaattgggacataattttggagcagaacatgatccggatggtctagcagaatgtgccccgaatgaggaccagggagggaaatatgtcatgtatcccatagctgtgagtggcgatcacgagaacaataagatgttttcaaactgcagtaaacaatcaatctataagaccattgaaagtaaggcccaggagtgttttcaagaacgcagcaataaagtttgtgggaactcgagggtggatgaaggagaagagtgtgatcctggcatcatgtatctgaacaacgacacctgctgcaacagcgactgcacgttgaaggaaggtgtccagtgcagtgacaggaacagtccttgctgtaaaaactgtcagtttgagactgcccagaagaagtgccaggaggcgattaatgctacttgcaaaggcgtgtcctactgcacaggtaatagcagtgagtgcccgcctccaggaaatgctgaagatgacactgtttgcttggatcttggcaagtgtaaggatgggaaatgcatccctttctgcgagagggaacagcagctggagtcctgtgcatgtaatgaaactgacaactcctgcaaggtgtgctgcagggacctttctggccgctgtgtgccctatgtcgatgctgaacaaaagaacttatttttgaggaaaggaaagccctgtacagtaggattttgtgacatgaatggcaaatgtgagaaacgagtacaggatgtaattgaacgattttgggatttcattgaccagctgagcatcaatacttttggaaagtttttagcagacaacatcgttgggtctgtcctggttttctccttgatattttggattcctttcagcattcttgtccattgtgtggataagaaattggataaacagtatgaatctctgtctctgtttcaccccagtaacgtcgaaatgctgagcagcatggattctgcatcggttcgcattatcaaaccctttcctgcgccccagactccaggccgcctgcagcctgcccctgtgatcccttcggcgccagcagctccaaaactggaccaccagagaatggacaccatccaggaagaccccagcacagactcacatatggacgaggatgggtttgagaaggaccccttcccaaatagcagcacagctgccaagtcatttgaggatctcacggaccatccggtcaccagaagtgaaaaggctgcctcctttaaactgcagcgtcagaatcgtgttgacagcaaagaaacagagtgctaatttagttctcagctcttctgacttaagtgtgcaaaatatttttatagatttgacctacaatcaatcacagcttatattttgtgaagactgggaagtgacttagcagatgctggtcatgtgtttggaacttcctgcaggtaaacagttcttgtgtgggtttgggcccntctccttttggaaaaggtaagggtgaaggtgaatcttgcttattntgggggtttcaggtttnagtttttaaaatatcttttggacctgtgggtgnaaaagcagaaatacagntggattgggttatgagtatttacgt

SEQ ID NO: 1000 - DNA, 2139 bp, Homo sapiens
gaggtgggaggagttccctgcagcctgcggggccaagaagaaagtgctaagctgaggagccgcagtcggaggaccccagggacccgacaggaagtctccgtacgaccccaacggatccacatgcccggaagcccaggcgacactaagccagcgctggggaactgacgtactcctgcagtcgcagggcgctccatgcctctctgtcctcttctttgttgtgggtaacgttctctgcgggagacctgaggttttccaagggggacatgccagctacactggccttggcgccctgagctaagcaccaggactcacagcctagcacgaaggcaggtagcaccttcacccgccgcggacgataggcgctctcctgtacctcctttagctcgcgaggcccgcccttcgcgaggtcccagagaaaagcaggctgtggaaaactggcgcccccttctttcacccaccttcttacccctgtcagcgccgagatctgtagcagaggttcctggtctgaaccaccgattggcaaagaaagctgcagattaaacttctcgttttacagagaaggaaactgaggcccagacagccgaaggagaggcagtctatggagcgcagcggtaaagagcaaggggttggtggccccagaatggaacctcagctctgccaggtaaccaacagctgtgtgaccctagacgagttccgcagtctctctgagcctcagtttccttactggtcaaacgggataatgggatactagcgcccacctcatagagttgttctgaggattagataggagagcagtgtgggcctttgactcaatcaactttacagtttttgttactactactgtttaaggacaggaaacaagttagtggcaacgcgagctgaaacccgggtctctcaacgtccagttggaggttttacccaccacccctctacctgttcagagctaatgggatgcagaggcgaggacagcccctggaaaaccatgtggcgttgatacactggcaaagcgcaggcatcccggcctcgaaggtgcataattattgcaatatgaaaaaatcgaggctgggtaggagcagggcagtgaggatttctcaacccttactttcaccccggcgctgtccactgcatctgacagagcgcggagctgggctgctacagccgcaaccccagggaccagtgcgcacgcctgggccgccctccgggagtcacccagcggccgcggacaactgaataaacaccccaaagcgctgcggtcggtcaagggcggggacagccacagtgcgcgcggggcccgcaggccgtaataaagagtggctcgacctcgctgctggcctgtcgcgggagaggaacaagctttcgactagcgcctctccccggggcccgcgccccgagccccacgccaagacagcccaacagctgttcctcccctccccgccgactccaactcttcggaatctgcccactcgggggctgcagggcaagtgtttaggatggttcccagccccgcgctgcgcggtgaaaatttcaacgtcattccttcaattaaaaaaaggggggggcaagggaggggctttgtgataactactcccagcttcttctgatcatttcaaaattaagtcgattttttttaaccagtccccacttactgtcctaactctcctcgctgaccctatctgggagccggaaccgttaggtactgccgaatgcggtgcaaatttcccctctcccccagttcgcagtgcctggagccgctggggttactcgtctgttctgatgccaccgcgagatggtccccgagctccccgagagtcctcagtgaaaggattccgcggcactgcctctattattataccgtaaatctttttaaattctggaactaattatatagaggatatgtctcaatttgttctgcattaatgccacagtggggatggaggccaggccgtggccagagcagatacgtaggcccatgaaattgatgaactgagagttgtcttccagtcctgagcgcaccatctggaattccagtctgaggttacaattagaactcctgaccccagattcaactttgtaaacaacaggggaaaaaaatggggaaaagaaaaaccacgagcgaggaaaaaaattatctgcacctgt

SEQ ID NO: 1001 - DNA, 720 bp, Homo sapiens
ctaaagggctagagcagaacataaaagattctttccaaaaagtgacactgagcagatatggaaaatatggacataagaatttacagttaagaaaaggctgtaaaagtgtggatgagtgtaaggaacaccaaggaggttataatggacttaaccaatgtttgaaaattaccacaagcaaaatatttcaatgtaataaatatgtaaaagtcatgcataaattttcaaattcaaatagacacaagataagacatactgaaaataaacatttcagatgtaaagaatgtgacaaatcactttgcatgctttcacgcctaactcaacataaaaaaattcatactagagagaatttctacaaatgtgaagagtgtggaaaaacctttaactggtccacaaacctttctaaacctaagaaaattcatactggagaaaaaccctacaaatgtgaagtatgtggaaaagcctttcaccaatcctcaatccttactaaacataagataattcgtactggagaaaaaccctataaatgtgcacactgtggcaaagcctttaaacagtcctcacaccttactagacataagataattcatactgaagagaaaccctacaaatgtgaacaatgtggcaaggtctttaagcagtccccaacccttactaaacatcagataatttatactggagaggaaccatacaaatgtgaggaatgtggcaaagcttttaacc

What is claimed is:

1. A process for identifying an agent that modulates the activity of a cancer-related gene comprising:
(a) contacting a compound with a cell containing a gene that corresponds to a polynucleotide having a sequence selected from the group consisting of SEQ ID NO: 1-1001 and under conditions promoting the expression of said gene; and
(b) detecting a difference in expression of said gene relative to when said compound is not present
thereby identifying an agent that modulates the activity of a cancer-related gene.

2. The process of claim 1 wherein said gene has a sequence selected from the group consisting of SEQ ID NO: 1-1001.

3. The process of claim 1 wherein the cell is a cancer cell, the sequence is selected from SEQ ID NO: 146-215 and the difference in expression is a decrease in expression.

4. The process of claim 1 wherein the cell is a cancer cell, the sequence is selected from SEQ ID NO: 504-686 and the difference in expression is a decrease in expression.

5. The process of claim 1 wherein the cell is a cancer cell, the sequence is selected from SEQ ID NO: 760-1001 and the difference in expression is a decrease in expression.

6. The process of claim 2 wherein the cell is a cancer cell, the sequence is selected from SEQ ID NO: 146-215 and the difference in expression is a decrease in expression.

7. The process of claim 2 wherein the cell is a cancer cell, the sequence is selected from SEQ ID NO: 504-686 and the difference in expression is a decrease in expression.

8. The process of claim 2 wherein the cell is a cancer cell, the sequence is selected from SEQ ID NO: 760-1001 and the difference in expression is a decrease in expression.

9. The process of claim 3, 4, 5, 6, 7 or 8 wherein the cancer cell is an kidney cancer cell.

10. The process of claim 3, 4, 5, 6, 7 or 8 wherein the cancer cell is a carcinoma cancer cell.

11. The process of claim 3 or 6 wherein the cancer is clear cell carcinoma.

12. The process of claim 4 or 7 wherein the cancer is renal cell carcinoma.

13. The process of claim 5 or 8 wherein the cancer is Wilm's tumor.

14. The process of claim 1 wherein the cell is a non-cancerous cell, the sequence is selected from SEQ ID NO: 1-145, 216-503 and 687-759 and the difference in expression is an increase in expression.

15. The process of claim 14 wherein the cell is a cell from kidney.

16. The process of claim 2 wherein the cell is a non-cancerous cell, the sequence is selected from SEQ ID NO: 1-145, 216-503 and 687-759 and the difference in expression is a decrease in expression.

17. The process of claim 16 wherein the cell is a cell from kidney.

18. The process of claim 1-17 wherein expression is determined for more than one said gene.

19. The process of claim 1-17 wherein expression is determined for at least 5 said genes.

20. The process of claim 1-17 wherein expression is determined for at least 10 said genes.

21. The process of claim 1-17 wherein expression is determined for all said genes of step (a).

22. A process for identifying an anti-neoplastic agent comprising contacting a cell exhibiting neoplastic activity with a compound first identified as a cancer related gene modulator using a process of one of claims 1-21 and detecting a decrease in said neoplastic activity after said contacting compared to when said contacting does not occur.

23. The process of claim 22 wherein said neoplastic activity is accelerated replication.

24. The process of claim 22 wherein said decrease in neoplastic activity results from the death of the cell.

25. A process for identifying an anti-neoplastic agent comprising administering to an animal exhibiting a cancer condition an effective amount of an agent first identified according to a process of one of claims 1-24 and detecting a decrease in said cancerous condition.

26. A process for determining the cancerous status of a cell, comprising determining the level of expression in said cell of at least one gene that corresponds to a polynucleotide having a sequence selected from the group consisting of SEQ ID NO: 1-1001 wherein an elevated expression relative to a known non-cancerous cell when the sequence is one of SEQ ID NO: 146-215, 504-686 and 760-1001 or a reduced expression relative to a known non-cancerous cell when the sequence is one of SEQ ID NO: 1-145, 216-503 and 687-759 indicates a cancerous state or potentially cancerous state.

27. The process of claim 26 wherein the cell is a cell from kidney.

28. The process of claim 27 wherein when said elevated expression is elevated expression of a gene corresponding to SEQ ID NO: 146-215 the cancer to be determined is clear cell carcinoma.

29. The process of claim 27 wherein when said elevated expression is elevated expression of a gene corresponding to SEQ ID NO: 216-503 the cancer to be determined is renal cell carcinoma.

30. The process of claim 27 wherein when said elevated expression is elevated expression of a gene corresponding to SEQ ID NO: 687-759 the cancer to be determined is Wilm's tumor.

31. The process of claim 23 wherein a cDNA of the gene has the sequence of SEQ ID NO: 1-1001.

32. The process of claims 27 28, 29, 30 or 31 wherein said expression is the expression of more than one said gene.

33. The process of claims 27 28, 29, 30 or 31 wherein said expression is the expression of at least 5 said genes.

34. The process of claims 27 28, 29, 30 or 31 wherein said expression is the expression of at least 10 said genes.

35. The process of claims 27 28, 29, 30 or 31 wherein said expression is the expression of all said genes.

36. A process for determining if a test gene is a cancer initiating or facilitating gene comprising contacting a cell expressing said test gene with an agent that decreases the expression of a gene that corresponds to a polynucleotide having a sequence selected from the group consisting of SEQ ID NO: 146-215, 504-686 and 760-1001, and detecting a decrease in expression of the test gene compared to when said agent is not present, thereby identifying said test gene as being a cancer initiating or facilitating gene.

37. The process of claim 36 wherein the gene determined by said process is an oncogene.

38. The process of claim 36 wherein the gene determined by said process is a cancer facilitating gene.

39. The process of claim 36 wherein said decrease in expression is due to a decrease in copy number of said gene in said cell or a cell derived from said cell.

40. A process for determining if a test gene is a cancer suppressor gene comprising contacting a cell expressing said test gene with an agent that increases the expression of a gene that corresponds to a polynucleotide having a sequence selected from the group consisting of SEQ ID NO: 1-145, 216-503 and 687-759 and detecting an increase in expression of said test gene compared to when said agent is not present, thereby identifying said test gene as being a cancer suppressor gene.

41. The process of claim 33 wherein said increase in expression is due to an increase in copy number of said gene in said cell or a cell derived from said cell.

42. A process for treating cancer comprising contacting a cancerous cell with an agent having activity against an expression product encoded by a gene sequence selected from the group consisting of SEQ ID NO: 146-215, 504-686 and 760-1001.

43. The process of claim 42 wherein said cancerous cell is contacted in vivo.

44. The process of claim 42 wherein said agent has affinity for said expression product.

45. The process of claim 44 wherein said agent is an antibody.

46. The process of claim 42 wherein said agent is an apoptosis-inducing agent.

47. A method for producing a product comprising identifying an agent according to the process of claim 1-25 wherein said product is the data collected with respect to said agent as a result of said process and wherein said data is sufficient to convey the chemical structure and/or properties of said agent.

48. A process for treating a cancerous condition in an animal afflicted therewith comprising administering to said animal a therapeutically effective amount of an agent first identified as having anti-neoplastic activity using the process of claim 25.

49. A process for protecting an animal against cancer comprising administering to an animal at risk of developing cancer a therapeutically effective amount of an agent first identified as having anti-neoplastic activity using the process of claim 25.

50. The process of claim 48 or 49 wherein said cancer is kidney cancer.

51. The process of claim 48 or 49 wherein said cancer is a carcinoma.

52. The process of claim 48 or 49 wherein said cancer is a member selected from the group consisting of clear cell carcinoma, renal cell carcinoma and Wilm's tumor.

53. A process for determining functionally related genes comprising contacting one or more gene sequences selected from the group consisting of the sequences of SEQ ID NO: 1-1001 with an agent that modulates expression of more than one gene in such group and thereby determining a subset of genes of said group.

54. The process of claim 53 wherein said functionally related genes are genes modulating the same metabolic pathway.

55. The process of claim 53 wherein said functionally related genes are genes encoding functionally related polypeptides.

56. The process of claim 53 wherein said functionally related genes are genes whose expression is modulated by the same transcription activator or enhancer sequence.

57. The process of claim 53 wherein said sequences are selected from SEQ ID NO: 146-215, 504-686 and 760-1001.

58. The process of claim 53 wherein said sequences are selected from SEQ ID NO: 1-145, 216-503 and 687-759.
